(19) United States
(12) Patent Application Publication
(10) Pub. No.: US 2023/0287458 A1
(43) Pub. Date: Sep. 14, 2023

(54) RECOMBINANT ADENO-ASSOCIATED VIRAL VECTORS FOR MULTIPARTITE GENE DELIVERY

(71) Applicant: Abeona Therapeutics Inc., New York, NY (US)

(72) Inventors: Linas PADEGIMAS, Mayfield, OH (US); Brianna BARRETT, New York, NY (US)

(21) Appl. No.: 18/015,412

(22) PCT Filed: Jul. 14, 2021
(86) PCT No.: PCT/US2021/041527

§ 371 Date: Jan. 10, 2023

Related U.S. Application Data
(60) Provisional application No. 63/051,721, filed on Jul. 14, 2020.
(60) Provisional application No. 63/179,612, filed on Apr. 26, 2021.

(51) Int. Cl. C12N 15/90; C12N 15/86; C12N 9/12

(52) U.S. Cl. CPC C12N 15/907; C12N 15/86; C12N 9/1241; C12N 2800/30; C12N 2750/14143

(57) ABSTRACT

Provided herein are recombinant AAV vectors, AAV viral vectors, and capsid proteins for improved gene therapy, and methods for their manufacture and use in a multipartite (e.g., bipartite) delivery system. The vectors provide portions of transgene and direct their recombination in a cell to provide complete transgenes.

### CROSS-REFERENCE TO RELATED APPLICATIONS

[0001] This application claims the benefit of U.S. Provisional Application No. 63/051,721, filed on Jul. 14, 2020 and U.S. Provisional Application No. 63/179,612, filed on Apr. 26, 2021, the contents of all of which are herein incorporated by reference in their entireties.

### INCORPORATION BY REFERENCE OF SEQUENCE LISTING

[0002] The contents of the text file submitted electronically herewith are incorporated herein by reference in their entirety: A computer readable format copy of the Sequence Listing (filename: ABEO_007_02WO_SeqList_ST25.txt, date created: Jul. 12, 2021, file size: about 721 kilobytes).

### BACKGROUND

[0003] Adeno-associated viral (AAV) vectors are promising delivery vectors for gene therapy. However, their therapeutic efficacy is undermined by limitations regarding delivery of genes above a certain size. For example, Stargardt disease is an inherited retinal disease that causes juvenile macular degeneration. Autosomal recessive Stargardt disease is caused by mutations in the ABCA4 gene. The ORF of the human ABCA4 gene is about 6.8 kb in length, which exceeds the packaging capacity of about 4.7 kb typical of AAV vectors. Therefore, there is an urgent need for AAV viral vector approaches for providing large genes.

### SUMMARY

[0004] The present disclosure relates generally to the field of gene therapy and in particular, to recombinant adeno-associated viral (AAV) vector particles (also known as AAV viral vectors) their use to deliver transgenes in a multipartite (e.g., bipartite) approach to treat or prevent a disease or disorder.

[0005] In one aspect, the present disclosure provides AAV vector genomes comprising, in 5′ to 3′ orientation:
[0006] (a) a 5′ AAV inverted terminal repeat;
[0007] (b) a promoter;
[0008] (c) a 5′ portion of a transgene;
[0009] (d) a splice donor (SD) site;
[0010] (e) a recombination site;
[0011] (f) a polynucleotide encoding a recombinase;
[0012] (g) a poly-A site; and
[0013] (h) a 3′ AAV inverted terminal repeat,
   wherein expression of the recombinase is operably linked to the promoter.

[0014] In embodiments, the recombinase is a Cre recombinase. In embodiments, the recombinase comprises a nuclear localization sequence (NLS). In embodiments, the recombination site comprises a LoxP71 sequence. In embodiments, the AAV vector genome comprises a polynucleotide encoding an internal cleavage polypeptide located between the recombination site and the polynucleotide encoding the recombinase, and wherein the 5′ portion of the transgene, the polynucleotide encoding the internal cleavage polypeptide, and the polynucleotide encoding the recombinase are in the same reading frame. In embodiments, the internal cleavage polypeptide is a self-cleaving peptide selected from the group consisting of T2A, P2A, E2A and F2A. In embodiments, the AAV vector genome comprises an internal ribosome entry site (IRES) located between the recombination site and the polynucleotide encoding the recombinase, and wherein the IRES is operably linked to the polynucleotide encoding the recombinase.

[0015] In embodiments, the transgene encodes a polypeptide. In embodiments, the polypeptide is an ABCA4 protein.

[0016] In embodiments, the promoter is a Rous sarcoma virus (RSV) LTR promoter (optionally with the RSV enhancer), a cytomegalovirus (CMV) promoter, an SV40 promoter, a dihydrofolate reductase promoter, a beta-actin promoter, a phosphoglycerol kinase (PGK) promoter, a U6 promoter, an H1 promoter, a CAG promoter, a hybrid chicken beta-actin promoter, an MeCP2 promoter, an EF1 promoter, a ubiquitous chicken β-actin hybrid (CBh) promoter, a U1a promoter, a U1b promoter, an MeCP2 promoter, an MeP418 promoter, an MeP426 promoter, a minimal MeCP2 promoter, a VMD2 promoter, an m Rho promoter, a EF1a promoter, a Ubc promoter, a human β-actin promoter, a TRE promoter, an Ac5 promoter, a Polyhedrin promoter, a CaMKIIa promoter, Gal1 promoter, a TEF1 promoter, a GDS promoter, an ADH1 promoter, a Ubi promoter, or an α-1-antitrypsin (hAAT) promoter. In embodiments, the promoter is a human rhodopsin kinase (RK) promoter, a human interphotoreceptor binding protein promoter (IRBP), a human red/green opsin promoter (pR2.1), a human blue opsin promoter (HB), a mouse opsin promoter (mOP), a mouse short wavelength opsin promoter (mBP), or a human rod cGMP phosphodiesterase β-subunit promoter (βPDE).

[0017] In one aspect, the present disclosure provides AAV vector genomes comprising, in 5′ to 3′ orientation:
[0018] (a) a 5′ AAV inverted terminal repeat;
[0019] (b) a recombination site;
[0020] (c) a splice acceptor (SA) site;
[0021] (d) a 3′ portion of a transgene;
[0022] (e) a poly-A site; and
[0023] (f) a 3′ AAV inverted terminal repeat.

[0024] In one aspect, the present disclosure provides AAV vectors comprising an AAV vector genome of the disclosure. In one aspect, the present disclosure provides polynucleotides comprising an AAV vector genome of the disclosure.

[0025] In one aspect, the present disclosure provides AAV viral particles comprising (i) an AAV capsid, wherein the AAV capsid comprises an AAV capsid protein; and (ii) a AAV vector genome of the disclosure. In embodiments, the AAV capsid protein is at least 70%, 80%, 90%, 99% or 100% identical to a sequence selected from SEQ ID NOs: 1-3, 67, 71, 196, 205 and 206.

[0026] In one aspect, the present disclosure provides pharmaceutical compositions comprising the AAV vector genome of the disclosure or the AAV viral particle of the disclosure. In embodiments, the pharmaceutical composition comprises:
[0027] (i) a first AAV viral particle comprising the AAV vector genome of the disclosure; and
[0028] (ii) a second AAV viral particle comprising a second AAV vector genome comprising, in 5′ to 3′ orientation:
   [0029] (a) a 5′ AAV inverted terminal repeat;
   [0030] (b) a recombination site:
   [0031] (c) a splice acceptor (SA) site;
   [0032] (d) a 3′ portion of the transgene;
   [0033] (e) a poly-A site; and
   [0034] (f) a 3′ AAV inverted terminal repeat;
[0035] wherein the recombination site in the AAV vector genome of the first AAV viral particle and the recombination site in the second AAV vector genome of the second AAV viral particle prevent backwards recombination.

[0036] In one aspect, the disclosure provides methods of treating a subject having a disease or disorder caused by a gene defect, comprising:
[0037] (1) administering to the subject a first AAV viral particle comprising:
   [0038] (i) an AAV capsid, wherein the AAV capsid comprises a first AAV capsid protein; and
   [0039] (ii) the AAV vector genome of the disclosure;
[0040] (2) administering to the subject a second AAV viral particle, comprising:
   [0041] (i) an AAV capsid, wherein the AAV capsid comprises a second AAV capsid protein; and
   [0042] (ii) a second AAV vector genome, wherein the second AAV vector genome comprises, in 5′ to 3′ orientation:
      [0043] (a) a 5′ AAV inverted terminal repeat;
      [0044] (b) a recombination site;
      [0045] (c) a splice acceptor (SA) site;
      [0046] (d) a 3′ portion of the transgene;
      [0047] (e) a poly-A site; and
      [0048] (f) a 3′ AAV inverted terminal repeat.
         In embodiments, administration of the first AAV viral particle and the second AAV viral particle leads to recombination of the first AAV vector genome and the second AAV vector genome via the recombination site in the AAV vector genome of the first AAV viral particle and the recombination site in the second AAV vector genome of the second AAV viral particle. In embodiments, administration of the first AAV viral particle and the second AAV viral particle leads to expression of the polypeptide. In embodiments, the first AAV viral particle and the second AAV viral particle are co-administered or sequentially administered. In embodiments, the first AAV viral particle and the second AAV viral particle are co-administered. In embodiments, the viral particles are administered by subretinal injection. In embodiments, the gene defect is an ABCA4 gene defect. In embodiments, the ABCA4 gene defect results in one or more conditions selected from the group consisting of reduced expression of ABCA4 protein, eliminated expression of ABCA4 protein, expression of a mutated ABCA4 protein, and reduced function of ABCA4 protein.

[0049] In one aspect, the disclosure provides methods of expressing a polypeptide in a cell, comprising:
[0050] (1) transducing the cell with a first AAV viral particle comprising the AAV vector genome of the disclosure, wherein the transgene encodes the polypeptide; and
[0051] (2) transducing the cell with a second AAV viral particle comprising a second AAV vector genome, wherein the second AAV vector genome comprises, in 5′ to 3′ orientation:
   [0052] (a) a 5′ AAV inverted terminal repeat;
   [0053] (b) a recombination site;
   [0054] (c) a splice acceptor (SA) site;
   [0055] (d) a 3′ portion of the transgene;
   [0056] (e) a poly-A site; and
   [0057] (f) a 3′ AAV inverted terminal repeat.
      In embodiments, no stable expression of the recombinase is detected in the transduced cell. In embodiments, the polypeptide is an ABCA4 protein.

[0058] In one aspect, the disclosure provides transduced cells comprising:
[0059] (i) a defective genomic copy of a gene;
[0060] (ii) a first recombinant nucleic acid comprising, in 5′ to 3′ orientation:
   [0061] (a) a 5′ AAV inverted terminal repeat;
   [0062] (b) a promoter;
   [0063] (c) a 5′ portion of a transgene;
   [0064] (d) a splice donor (SD) site;
   [0065] (e) a recombination site;
   [0066] (f) a splice acceptor (SA) site;
   [0067] (g) a 3′ portion of the transgene;
   [0068] (h) a poly-A site; and
   [0069] (i) a 3′ AAV inverted terminal repeat;
   [0070] wherein the transgene has a length of 4.6-7.7 kb; and
[0071] (iii) a second recombinant nucleic acid comprising, in 5′ to 3′ orientation: a 5′ AAV inverted terminal repeat, a polynucleotide encoding a recombinase, and a 3′ AAV inverted terminal repeat; wherein the second recombinant nucleic acid lacks a promoter.
   In embodiments, no stable expression of the recombinase is detected in the transduced cell. In embodiments, the recombinase is a Cre recombinase. In embodiments, the transgene encodes an ABCA4 gene. In embodiments, the cell is an ex vivo cell.

### BRIEF DESCRIPTION OF THE DRAWINGS

[0072] FIGS. 1A-1B depict illustrative AAV vector genomes for multipartite gene delivery. FIG. 1A depicts illustrative AAV vector genomes for bipartite gene delivery. “ITR” stands for “inverted terminal repeat”; “SD” stands for “splice donor”; “RS” stands for “recombination site”; “IC” stands for “internal cleavage polypeptide”; “Rec” stands for “recombinase”; “NLS” stands for “nuclear localization sequence”; “pA” stands for “poly-A site”; and “SA” stands for “splice acceptor”. FIG. 11B depicts illustrative AAV vector genomes for multipartite gene delivery of a transgene in three portions. “ITR” stands for “inverted terminal repeat”; “SD” stands for “splice donor”; “RS” stands for “recombination site”; “IC” stands for “internal cleavage polypeptide”; “Rec” stands for “recombinase”; “NLS” stands for “nuclear localization sequence”; “pA” stands for “poly-A site”; and “SA” stands for “splice acceptor”.

[0073] FIG. 2 depicts A3CA4 constructs used in tissue culture studies.

[0074] FIG. 3A shows the necessity of Cre recombinase for expression of full-length ABCA4 protein mediated by recombination of partial ABCA4 constructs transfected into Lec2 cells. FIG. 3B shows the expression level of recombined full-length ABCA4 protein in Lec2 cells transfected with various ABCA4 constructs.

[0075] FIG. 4 shows the lack of stable expression of auto-cleaved Cre recombinase in Lec2 cells after recombination of partial ABCA4 constructs.

[0076] FIG. 5 shows the expression level of full-length ABCA4 mRNA in Lec2 cells transfected with various ABCA4 constructs.

[0077] FIG. 6 shows the expression level of full-length ABCA4 mRNA over time in cells transduced with indicated AAV9 viral particles.

[0078] FIGS. 7A-7B depict representative diagrams of AAV vector genomes bipartite delivery of ABCA4 gene. FIG. 7A depicts the construction of a first AAV vector genome (5′ ABCA4 Cre) comprising a human RK promoter, a 5′ portion of ABCA4 gene, a Cre recombinase gene and other genomic elements. FIG. 7B depicts the construction of a second AAV vector genome (3′ ABCA4) comprising a 3′ portion of ABCA4 gene and other genomic elements.

### DETAILED DESCRIPTION

[0079] Embodiments according to the present disclosure will be described more fully hereinafter. Aspects of the disclosure may, however, be embodied in different forms and should not be construed as limited to the embodiments set forth herein. Rather, these embodiments are provided so that this disclosure will be thorough and complete, and will fully convey the scope of the invention to those skilled in the art. The terminology used in the description herein is for the purpose of describing particular embodiments only and is not intended to be limiting.

[0080] Unless otherwise defined, all terms (including technical and scientific terms) used herein have the same meaning as commonly understood by one of ordinary skill in the art to which this invention belongs. It will be further understood that terms, such as those defined in commonly used dictionaries, should be interpreted as having a meaning that is consistent with their meaning in the context of the present application and relevant art and should not be interpreted in an idealized or overly formal sense unless expressly so defined herein.

[0081] Unless the context indicates otherwise, it is specifically intended that the various features of the invention described herein can be used in any combination. Moreover, the disclosure also contemplates that in embodiments, any feature or combination of features set forth herein can be excluded or omitted. To illustrate, if the specification states that a complex comprises components A, B and C, it is specifically intended that any of A, B or C, or a combination thereof, can be omitted and disclaimed singularly or in any combination.

[0082] Unless explicitly indicated otherwise, all specified some embodiments, features, and terms intend to include both the recited embodiment, feature, or term and biological equivalents thereof.

### INCORPORATION BY REFERENCE

[0083] All references, articles, publications, patents, patent publications, and patent applications cited herein are incorporated by reference in their entireties for all purposes. However, mention of any reference, article, publication, patent, patent publication, and patent application cited herein is not, and should not, be taken as an acknowledgment or any form of suggestion that they constitute valid prior art or form part of the common general knowledge in any country in the world.

### Definitions

[0084] The practice of the present technology will employ, unless otherwise indicated, conventional techniques of organic chemistry, pharmacology, immunology, molecular biology, microbiology, cell biology and recombinant DNA, which are within the skill of the art. See, e.g., Sambrook, Fritsch and Maniatis, Molecular Cloning: A Laboratory Manual, 2nd edition (1989); Current Protocols In Molecular Biology (F. M. Ausubel, et al. eds., (1987)); the series Methods in Enzymology (Academic Press, Inc.): PCR 2: A Practical Approach (M. J. MacPherson, B. D. Hames and GR. Taylor eds. (1995)), Harlow and Lane, eds. (1988) Antibodies, a Laboratory Manual, and Animal Cell Culture (RI. Freshney, ed. (1987)).

[0085] As used in the description of the invention and the appended claims, the singular forms “a,” “an” and “the” are intended to include the plural forms as well, unless the context clearly indicates otherwise.

[0086] As used herein, the term “comprising” is intended to mean that the compositions and methods include the recited elements, but do not exclude others. As used herein, the transitional phrase “consisting essentially of” (and grammatical variants) is to be interpreted as encompassing the recited materials or steps and those that do not materially affect the basic and novel characteristic(s) of the recited embodiment. Thus, the term “consisting essentially of” as used herein should not be interpreted as equivalent to “comprising.” “Consisting of” shall mean excluding more than trace elements of other ingredients and substantial method steps for administering the compositions disclosed herein. Aspects defined by each of these transition terms are within the scope of the present disclosure.

[0087] All numerical designations, e.g., pH, temperature, time, concentration, and molecular weight, including ranges, are approximations which may be varied (+) or (−) by increments of 1.0 or 0.1, as appropriate, or, alternatively, by a variation of +/−15%, 10%, 5%, 2%. It is to be understood, although not always explicitly stated, that all numerical designations are preceded by the term “about”. It also is to be understood, although not always explicitly stated, that the reagents described herein are merely exemplary and that equivalents of such are known in the art. The term “about,” as used herein when referring to a measurable value such as an amount or concentration and the like, is meant to encompass variations of 10% of the specified amount.

[0088] The terms “acceptable,” “effective,” or “sufficient” when used to describe the selection of any components, ranges, dose forms, etc. disclosed herein intend that said component, range, dose form, etc. is suitable for the disclosed purpose.

[0089] Also, as used herein, “and/or” refers to and encompasses any and all possible combinations of one or more of the associated listed items, as well as the lack of combinations when interpreted in the alternative (“or”).

[0090] Unless specifically recited, the term “host cell” includes a eukaryotic host cell, including, for example, fungal cells, yeast cells, higher plant cells, insect cells and mammalian cells. Non-limiting examples of eukaryotic host cells include simian, bovine, porcine, murine, rat, avian, reptilian and human, e.g., HEK293 cells and 293T cells.

[0091] The term “isolated” as used herein refers to molecules or biologicals or cellular materials being substantially free from other materials.

[0092] As used herein, the terms “nucleic acid sequence” and “polynucleotide” are used interchangeably to refer to a polymeric form of nucleotides of any length, either ribonucleotides or deoxyribonucleotides. Thus, this term includes, but is not limited to, single-, double-, or multi-stranded DNA or RNA, genomic DNA, cDNA, DNA-RNA hybrids, or a polymer comprising, consisting essentially of, or consisting of purine and pyrimidine bases or other natural, chemically or biochemically modified, non-natural, or derivatized nucleotide bases.

[0093] A “gene” refers to a polynucleotide containing at least one open reading frame (ORF) that is capable of encoding a particular polypeptide or protein. A “gene product” or, alternatively, a “gene expression product” refers to the amino acid sequence (e.g., peptide or polypeptide) generated when a gene is transcribed and translated.

[0094] As used herein, “expression” refers to the two-step process by which polynucleotides are transcribed into mRNA and/or the process by which the transcribed mRNA is subsequently translated into peptides, polypeptides, or proteins. If the polynucleotide is derived from genomic DNA, expression may include splicing of the mRNA in a eukaryotic cell.

[0095] “Under transcriptional control” is a term well understood in the art and indicates that transcription of a polynucleotide sequence, usually a DNA sequence, depends on its being operatively linked to an element that contributes to the initiation of, or promotes, transcription. “Operatively linked” intends that the polynucleotides are arranged in a manner that allows them to function in a cell. For example, promoters may be operatively linked to the downstream sequences.

[0096] The term “encode” as it is applied to polynucleotides refers to a polynucleotide which is said to “encode” a polypeptide if, in its native state or when manipulated by methods well known to those skilled in the art, it can be transcribed to produce the mRNA for the polypeptide and/or a fragment thereof. The antisense strand is the complement of such a nucleic acid, and the encoding sequence can be deduced therefrom.

[0097] The term “promoter” as used herein means a control sequence that is a region of a polynucleotide sequence at which the initiation and rate of transcription of a coding sequence, such as a gene or a transgene, are controlled. Promoters may be constitutive, inducible, repressible, or tissue-specific, for example. Promoters may contain genetic elements at which regulatory proteins and molecules such as RNA polymerase and transcription factors may bind. Non-limiting exemplary promoters include a human rhodopsin kinase (RK) promoter, a human interphotoreceptor binding protein promoter (IRBP), a human red/green opsin promoter (pR2.1), a human blue opsin promoter (HB), a mouse opsin promoter (mOP), a mouse short wave opsin promoter (mBP) (short wave opsin promoters may also be referred to as S-opsin or blue opsin promoters), a human rod cGMP phosphodiesterase β-subunit promoter (βPDE), a Rous sarcoma virus (RSV) LTR promoter (optionally with the RSV enhancer), a cytomegalovirus (CMV) promoter, an SV40 promoter, a dihydrofolate reductase promoter, a β-actin promoter, a phosphoglycerol kinase (PGK) promoter, a U6 promoter, an H1 promoter, a ubiquitous chicken β-actin hybrid (CBh) promoter, a small nuclear RNA (U1a or U1b) promoter, an MeCP2 promoter, an MeP418 promoter, an MeP426 promoter, a minimal MeCP2 promoter, a VMD2 promoter, an mRho promoter or an EFI promoter.

[0098] Additional non-limiting exemplary promoters provided herein include, but are not limited to EF1a, Ubc, human β-actin, CAG, TRE, Ac5, polyhedrin, CaMKIIa, Gal1, TEF1, GDS, ADH1, Ubi, and α-1-antitrypsin (bAAT) It is known in the art that the nucleotide sequences of such promoters may be modified in order to increase or decrease the efficiency of mRNA transcription. See, e.g., Gao et al. (2018) Mol. Ther.: Nucleic Acids 12:135-145 (modifying TATA box of 7SK, U6 and H1 promoters to abolish RNA polymerase III transcription and stimulate RNA polymerase II-dependent mRNA transcription). Synthetically-derived promoters may be used for ubiquitous or tissue specific expression. Further, virus-derived promoters, some of which are noted above, may be useful in the methods disclosed herein, e.g., CMV, HIV, adenovirus, and AAV promoters. In embodiments, the promoter is used together with an enhancer to increase the transcription efficiency. Non-limiting examples of enhancers include an interstitial retinoid-binding protein (IRBP) enhancer, an RSV enhancer or a CMV enhancer.

[0099] An enhancer is a regulatory element that increases the expression of a target sequence. A “promoter/enhancer” is a polynucleotide that contains sequences capable of providing both promoter and enhancer functions. For example, the long terminal repeats of retroviruses contain both promoter and enhancer functions. The enhancer/promoter may be “endogenous” or “exogenous” or “heterologous.” An “endogenous” enhancer/promoter is one which is naturally linked with a given gene in the genome. An “exogenous” or “heterologous” enhancer/promoter is one which is placed in juxtaposition to a gene by means of genetic manipulation (i.e., molecular biological techniques) such that transcription of that gene is directed by the linked enhancer/promoter. Non-limiting examples of linked enhancer/promoter for use in the methods, compositions and constructs provided herein include a PDE promoter plus IRBP enhancer or a CMV enhancer plus U1a promoter. It is understood in the art that enhancers can operate from a distance and irrespective of their orientation relative to the location of an endogenous or heterologous promoter. It is thus further understood that an enhancer operating at a distance from a promoter is thus “operably linked” to that promoter irrespective of its location in the vector or its orientation relative to the location of the promoter.

[0100] The term “protein”, “peptide” and “polypeptide” are used interchangeably and in their broadest sense to refer to a compound of two or more subunits of amino acids, amino acid analogs or peptidomimetics. The subunits may be linked by peptide bonds. In another aspect, the subunit may be linked by other bonds, e.g., ester, ether, etc. A protein or peptide must contain at least two amino acids and no limitation is placed on the maximum number of amino acids which may comprise, consist essentially of, or consist of a protein's or peptide's sequence. As used herein the term “amino acid” refers to either natural and/or unnatural or synthetic amino acids, including glycine and both the D and L optical isomers, amino acid analogs and peptidomimetics.

[0101] As used herein, the term “signal peptide” or “signal polypeptide” intends an amino acid sequence usually present at the N-terminal end of newly synthesized secretory or membrane polypeptides or proteins. It acts to direct the polypeptide to a specific cellular location, e.g. across a cell membrane, into a cell membrane, or into the nucleus. In embodiments, the signal peptide is removed following localization. Examples of signal peptides are well known in the art. Non-limiting examples are those described in U.S. Pat. Nos. 8,853,381, 5,958,736, and 8,795,965. As a further non-limiting example, the signal peptide can be an IDUA signal peptide.

[0102] The terms “equivalent” or “biological equivalent” are used interchangeably when referring to a particular molecule, biological material, or cellular material and intend those having minimal homology while still maintaining desired structure or functionality. Non-limiting examples of equivalent polypeptides include a polypeptide having at least about 60%, at least about 65%, at least about 70%, at least about 75%, at least about 80%, at least about 85%, at least about 90%, at least about 95% identity or at least about 99% identity to a reference polypeptide (for instance, a wild-type polypeptide); or a polypeptide which is encoded by a polynucleotide having at least about 70%, at least about 75%, at least about 80%, at least about 85%, at least about 90%, at least about 95% identity, at least about 97% sequence identity or at least about 99% sequence identity to the reference polynucleotide (for instance, a wild-type polynucleotide).

[0103] “Homology” or “identity” or “similarity” refers to sequence similarity between two peptides or between two nucleic acid molecules. Percent identity can be determined by comparing a position in each sequence that may be aligned for purposes of comparison. When a position in the compared sequence is occupied by the same base or amino acid, then the molecules are identical at that position. A degree of identity between sequences is a function of the number of matching positions shared by the sequences. “Unrelated” or “non-homologous” sequences share less than 40% identity, less than 25% identity, with one of the sequences of the present disclosure. Alignment and percent sequence identity may be determined for the nucleic acid or amino acid sequences provided herein by importing said nucleic acid or amino acid sequences into and using ClustalW (available at https://genome.jp/tools-bin/clustalw/). For example, the ClustalW parameters can be generated using the Gonnet (for protein) weight matrix. The ClustalW parameters used for performing nucleic acid sequence alignments using the nucleic acid sequences found herein are generated using the ClustalW (for DNA) weight matrix.

[0104] As used herein, amino acid modifications may be amino acid substitutions, amino acid deletions or amino acid insertions. Amino acid substitutions may be conservative amino acid substitutions or non-conservative amino acid substitutions. A conservative replacement (also called a conservative mutation, a conservative substitution or a conservative variation) is an amino acid replacement in a protein that changes a given amino acid to a different amino acid with similar biochemical properties (e.g., charge, hydrophobicity or size). As used herein, “conservative variations” refer to the replacement of an amino acid residue by another, structurally or functionally similar residue. Examples of conservative variations include the substitution of one hydrophobic residue such as isoleucine, valine, leucine or methionine for another; or the substitution of one charged or polar residue for another, such as the substitution of arginine for lysine, glutamic acid for aspartic acid, glutamine for asparagine, and the like. Other illustrative examples of conservative substitutions include the changes of: alanine to serine; asparagine to glutamine or histidine; aspartate to glutamate; cysteine to serine; glycine to proline; histidine to asparagine or glutamine; lysine to arginine, glutamine, or glutamate; phenylalanine to tyrosine, serine to threonine; threonine to serine; tryptophan to tyrosine; tyrosine to tryptophan or phenylalanine; and the like.

[0105] As used herein, the term “vector” refers to a nucleic acid comprising, consisting essentially of, or consisting of an intact replicon such that the vector may be replicated when placed within a cell, for example by a process of transfection, infection, or transformation. It is understood in the art that once inside a cell, a vector may replicate as an extrachromosomal (episomal) element or may be integrated into a host cell chromosome. Vectors may include nucleic acids derived from retroviruses, adenoviruses, herpesvirus, baculoviruses, modified baculoviruses, papovaviruses, AAV viral vectors, lentiviral vectors, adenovirus vectors, alphavirus vectors and the like. Alphavirus vectors, such as Semliki Forest virus-based vectors and Sindbis virus-based vectors, have also been developed for use in gene therapy and immunotherapy. See, e.g., Schlesinger and Dubensky (1999) Curr. Opin. Biotechnol. 5:434-439 and Ying, et al. (1999) Nat. Med. 5(7): 823-827. Exemplary non-viral vectors for delivering nucleic acid include naked DNA; DNA complexed with cationic lipids, alone or in combination with cationic polymers; anionic and cationic liposomes; DNA-protein complexes and particles comprising, consisting essentially of, or consisting of DNA condensed with cationic polymers such as heterogeneous polylysine, defined-length oligopeptides, and polyethyleneimine, in some cases contained in liposomes; and the use of ternary complexes comprising, consisting essentially of, or consisting of a virus and polylysine-DNA.

[0106] With respect to general recombinant techniques, vectors that contain both a promoter and a cloning site into which a polynucleotide can be operatively linked are well known in the art. Such vectors are capable of transcribing RNA in vitro or in vivo, and are commercially available from sources such as Agilent Technologies (Santa Clara, Calif) and Promega Biotech (Madison, Wis.). In order to optimize expression and/or in vitro transcription, it may be necessary to remove, add or alter 5′ and/or 3 untranslated portions of cloned transgenes to eliminate extra, potential inappropriate alternative translation initiation codons or other sequences that may interfere with or reduce expression, either at the level of transcription or translation. Alternatively, consensus ribosome binding sites can be inserted immediately 5′ of the start codon to enhance expression.

[0107] As used herein, the term “recombinant expression system” or “recombinant vector” refers to a genetic construct or constructs for the expression of certain genetic material formed by recombination.

[0108] A “gene delivery vehicle” is defined as any molecule that can carry inserted polynucleotides into a host cell. Examples of gene delivery vehicles are liposomes, micelles biocompatible polymers, including natural polymers and synthetic polymers; lipoproteins; polypeptides; polysaccharides; lipopolysaccharides; artificial viral envelopes; metal particles; bacteria; viruses, such as baculoviruses, adeno-associated viruses, adenoviruses and retroviruses; bacteriophage, cosmid, plasmid, and fungal vectors; and other recombination vehicles typically used in the art which have been described for expression in a variety of eukaryotic and prokaryotic hosts, and may be used for gene therapy as well as for simple protein expression. Liposomes that also comprise, consist essentially of, or consist of a targeting antibody or fragment thereof can be used in the methods disclosed herein. In addition to the delivery of polynucleotides to a cell or cell population, direct introduction of the proteins described herein to the cell or cell population can be done by the non-limiting technique of protein transfection, alternatively culturing conditions that can enhance the expression and/or promote the activity of the proteins disclosed herein are other non-limiting techniques.

[0109] A polynucleotide disclosed herein can be delivered to a cell or tissue using a gene delivery vehicle. “Gene delivery,” “gene transfer,” “transducing,” and the like as used herein, are terms referring to the introduction of an exogenous polynucleotide (sometimes referred to as a “transgene”) into a host cell, irrespective of the method used for the introduction. Such methods include a variety of well-known techniques such as vector-mediated gene transfer (by, e.g., viral infection/transfection, or various other protein-based or lipid-based gene delivery complexes) as well as techniques facilitating the delivery of “naked” polynucleotides (such as electroporation, “gene gun” delivery and various other techniques used for the introduction of polynucleotides). The introduced polynucleotide may be stably or transiently maintained in the host cell. Stable maintenance typically requires that the introduced polynucleotide either contains an origin of replication compatible with the host cell or integrates into a replicon of the host cell such as an extrachromosomal replicon (e.g., a plasmid) or a nuclear or mitochondrial chromosome. A number of vectors are known to be capable of mediating transfer of genes to mammalian cells, as is known in the art and described herein.

[0110] A “plasmid” is a DNA molecule that is typically separate from and capable of replicating independently of the chromosomal DNA. In many cases, it is circular and double-stranded. Plasmids provide a mechanism for horizontal gene transfer within a population of microbes and typically provide a selective advantage under a given environmental state. Plasmids may carry genes that provide resistance to naturally occurring antibiotics in a competitive environmental niche, or, alternatively, the proteins produced may act as toxins under similar circumstances. It is known in the art that while plasmid vectors often exist as extrachromosomal circular DNA molecules, plasmid vectors may also be designed to be stably integrated into a host chromosome either randomly or in a targeted manner, and such integration may be accomplished using either a circular plasmid or a plasmid that has been linearized prior to introduction into the host cell.

[0111] “Plasmids” used in genetic engineering are called “plasmid vectors”. Many plasmids are commercially available for such uses. The gene to be replicated is inserted into copies of a plasmid containing genes that make cells resistant to particular antibiotics, and a multiple cloning site (MCS, or polylinker), which is a short region containing several commonly used restriction sites allowing the easy insertion of DNA fragments at this location. Another major use of plasmids is to make large amounts of proteins. In this case, researchers grow bacteria or eukaryotic cells containing a plasmid harboring the gene of interest, which can be induced to produce large amounts of proteins from the inserted gene.

[0112] The term “adeno-associated virus” or “AAV” as used herein refers to a member of the class of viruses associated with this name and belonging to the genus Dependoparvovirus, family Parvoviridae. Adeno-associated virus is a single-stranded DNA virus that grows only in cells in which certain functions are provided by a co-infecting helper virus. General information and reviews of AAV can be found in, for example, Carter, 1989, Handbook of Parvoviruses, Vol. 1, pp. 169-228, and Berns, 1990, Virology, pp. 1743-1764, Raven Press, (New York). It is fully expected that the same principles described in these reviews will be applicable to additional AAV serotypes characterized after the publication dates of the reviews because it is well known that the various serotypes are quite closely related, both structurally and functionally, even at the genetic level. (See, for example, Blacklowe, 1988, pp. 165-174 of Parvoviruses and Human Disease, J. R. Pattison, ed.; and Rose, Comprehensive Virology 3: 1-61 (1974)). For example, all AAV serotypes apparently exhibit very similar replication properties mediated by homologous rep genes; and all bear three related capsid proteins such as those expressed in AAV2. The degree of relatedness is further suggested by heteroduplex analysis which reveals extensive cross-hybridization between serotypes along the length of the genome; and the presence of analogous self-annealing segments at the termini that correspond to “inverted terminal repeat sequences” (ITRs). The similar infectivity patterns also suggest that the replication functions in each serotype are under similar regulatory control. Multiple serotypes of this virus are known to be suitable for gene delivery; all known serotypes can infect cells from various tissue types. At least 11 sequentially numbered naturally-occurring AAV serotypes are known in the art. Non-limiting exemplary serotypes useful in the methods disclosed herein include any of those 11 serotypes, e.g., AAV2, AAV8, AAV9, or variant serotypes, e.g., AAV-DJ and AAV PHP.B The AAV particle comprises, consists essentially of, or consists of three major viral proteins: VP1, VP2 and VP3. In embodiments, the AAV refers to the serotype AAV1, AAV2, AAV4, AAV5, AAV6, AAV7, AAV8, AAV9, AAV10, AAV11, AAV12, or AAV13. In embodiments, the AAV particle comprises an AAV capsid protein selected from the group consisting of AAVPHP.B, AAVrh74, AAV 110, AAV 204, AAV 214, AAV 214A, AAV 214e, AAV 214e8, AAV 214e9, AAV 214e10, AAV ITB102_45, and AAV 214AB.

[0113] An “AAV vector” as used herein refers to a vector comprising one or more heterologous nucleic acid (HNA) sequences and one or more AAV inverted terminal repeat sequences (ITRs). Such AAV vectors can be replicated in a host cell that provides the functionality of rep and cap gene products, and allow the ITRs and the nucleic acid between the ITRs to be packaged into infectious viral particles. In embodiments, AAV vectors comprise a promoter, at least one nucleic acid that may encode at least one protein or RNA, and/or an enhancer and/or a terminator within the flanking ITRs that is packaged into the infectious AAV particle. The ITRs and the nucleic acid between the ITRs may be encapsidated into the AAV caspid, and this encapsidated nucleic acid may be referred to as the “AAV vector genome.” AAV vectors may contain elements in addition to the encapsidated portion, for example, antibiotic resistance genes or other elements known in the art included in the plasmid for manufacturing purposes but not packaged into the AAV particle.

[0114] As used herein, the term “viral capsid” or “capsid” refers to the proteinaceous shell or coat of a viral particle. Capsids function to encapsidate, protect, transport, and/or release into the host cell a viral genome. Capsids are generally comprised of oligomeric structural subunits of protein (“capsid proteins”). As used herein, the term “encapsidated” means enclosed within a viral capsid. The viral capsid of AAV is composed of a mixture of three viral capsid proteins: VP1, VP2, and VP3. The mixture of VP1, VP2 and VP3 contains 60 monomers that are arranged in a T=1 icosahedral symmetry in a ratio of 1:1:10 (VP1:VP2:VP3) or 1:1:20 (VP1:VP2:VP3) as described in Sonntag F et al., (June 2010). “A viral assembly factor promotes AAV2 capsid formation in the nucleolus”. Proceedings of the National Academy of Sciences of the United States of America. 107 (22): 10220-5, and Rabinowitz J E, Samulski R J (December 2000). “Building a better vector: the manipulation of AAV virions”. Virology. 278 (2): 301-8, each of which is incorporated herein by reference in its entirety.

[0115] An “AAV virion” or “AAV viral particle” or “AAV viral vector” or “AAV vector particle” or “AAV particle” refers to a viral particle composed of at least one AAV capsid protein and an encapsidated polynucleotide from an AAV vector referred to herein as the AAV vector genome.

[0116] As used herein, the term “helper” in reference to a virus or plasmid refers to a virus or plasmid used to provide the additional components necessary for replication and packaging of any one of the AAV vector genomes disclosed herein. The components encoded by a helper virus or plasmid may include any genes required for virion assembly, encapsidation, genome replication, and/or packaging. For example, the helper virus or plasmid may encode enzymes or other factors necessary for replication of the viral genome in the host cell. Non-limiting examples of helper viruses and plasmids suitable for use with AAV constructs include pHELP (plasmid), adenovirus (virus), or herpesvirus (virus).

[0117] As used herein, a packaging cell (or a helper cell) is a cell used to produce viral vectors. Producing recombinant AAV viral vectors requires AAV Rep and Cap proteins provided in trans, as well as adenovirus gene sequences that help AAV replicate. In some aspects, packaging/helper cells contain a plasmid that is stably incorporated into the genome of the cell. In other aspects, the packaging cell may be transiently transfected. Typically, a packaging cell is a eukaryotic cell, such as a mammalian cell or an insect cell.

[0118] As used herein, a reporter protein is a detectable protein that is operably linked to a promoter to assay the expression (for example, tissue specificity and/or strength) of the promoter. In aspects, a reporter protein may be operably linked to another polypeptide. In aspects, reporter proteins may be used in monitoring DNA delivery methods, functional identification and characterization of promoter and enhancer elements, translation and transcription regulation, mRNA processing and protein:protein interactions. Non-limiting examples of reporter proteins are β-galactosidase; fluorescent proteins such as green Fluorescent Protein (GFP) or Red Fluorescent Protein (RFP); luciferase; glutathione S-transferase (GST); and maltose binding protein (MBP).

[0119] In embodiments, compositions herein may comprise a pharmaceutically acceptable carrier. As used herein, the term “pharmaceutically acceptable carrier” encompasses any of the standard pharmaceutical carriers, such as a phosphate buffered saline solution, water, and emulsions, such as an oil/water or water/oil emulsion, and various types of wetting agents. The compositions also can include stabilizers and preservatives. For examples of carriers, stabilizers and adjuvants, see Martin (1975) Remington's Pharm. Sci., 15th Ed. (Mack Publ. Co., Easton).

[0120] A “subject” of diagnosis or treatment is a cell or an animal such as a mammal, or a human. A subject is not limited to a specific species and includes non-human animals subject to diagnosis or treatment and those subject to infections or animal models, including, without limitation, simian, murine, rat, canine, or leporid species, as well as other livestock, sport animals, or pets. In embodiments, the subject is a human.

[0121] The term “tissue” is used herein to refer to tissue of a living or deceased organism or any tissue derived from or designed to mimic a living or deceased organism. The tissue may be healthy, diseased, and/or have genetic mutations. The biological tissue may include any single tissue (e.g., a collection of cells that may be interconnected), or a group of tissues making up an organ or part or region of the body of an organism. The tissue may comprise, consist essentially of, or consist of a homogeneous cellular material or it may be a composite structure such as that found in regions of the body including the thorax which for instance can include lung tissue, skeletal tissue, and/or muscle tissue. Exemplary tissues include, but are not limited to those derived from eye, liver, lung, thyroid, skin, pancreas, blood vessels, bladder, kidneys, brain, biliary tree, duodenum, abdominal aorta, iliac vein, heart and intestines, including any combination thereof.

[0122] As used herein, “treating” or “treatment” of a disease in a subject refers to (1) preventing the symptoms or disease from occurring in a subject that is predisposed or does not yet display symptoms of the disease; (2) inhibiting the disease or arresting its development; or (3) ameliorating or causing regression of the disease or the symptoms of the disease. As understood in the art, “treatment” is an approach for obtaining beneficial or desired results, including clinical results. For the purposes of the present technology, beneficial or desired results can include one or more, but are not limited to, alleviation or amelioration of one or more symptoms, diminishment of extent of a condition (including a disease), stabilized (i.e., not worsening) state of a condition (including disease), delay or slowing of condition (including disease) progression, amelioration or palliation of the condition (including disease) states and remission (whether partial or total), whether detectable or undetectable.

[0123] As used herein the term “effective amount” intends to mean a quantity sufficient to achieve a desired effect. In the context of therapeutic or prophylactic applications, the effective amount may depend on the type and severity of the condition at issue and the characteristics of the individual subject, such as general health, age, sex, body weight, and tolerance to pharmaceutical compositions. In the context of gene therapy, in embodiments an effective amount is an amount sufficient to result in gaining partial or full function of a gene that is deficient in a subject. In other embodiments, the effective amount of an AAV viral particle is the amount sufficient to result in expression of a gene in a subject. The skilled artisan will be able to determine appropriate amounts depending on these and other factors.

[0124] In embodiments, the effective amount will depend on the size and nature of the application in question. It will also depend on the nature and sensitivity of the target subject and the methods in use. The skilled artisan will be able to determine the effective amount based on these and other considerations. The effective amount may comprise, consist essentially of, or consist of one or more administrations of a composition depending on the embodiment.

[0125] As used herein, the term “administer” or “administration” intends to mean delivery of a substance to a subject such as an animal or human. Administration can be effected in one dose, continuously or intermittently throughout the course of treatment. Methods of determining the most effective means and dosage of administration are known to those of skill in the art and will vary with the composition used for therapy, the purpose of the therapy, as well as the age, health or gender of the subject being treated. Single or multiple administrations can be carried out with the dose level and pattern being selected by the treating physician or in the case of pets and other animals, treating veterinarian.

### AAV Structure and Function

[0126] AAV is a replication-deficient parvovirus, the single-stranded DNA genome of which is about 4.7 kb in length, including two 145-nucleotide inverted terminal repeat (ITRs). There are multiple serotypes of AAV. The nucleotide sequences of the genomes of the AAV serotypes are known. For example, the complete genome of AAV-1 is provided in GenBank Accession No. NC_002077; the complete genome of AAV-2 is provided in GenBank Accession No. NC_001401 and Srivastava et al., J. Virol., 45: 555-564 (1983); the complete genome of AAV-3 is provided in GenBank Accession No. NC_001729; the complete genome of AAV-4 is provided in GenBank Accession No. NC_001829; the AAV-5 genome is provided in GenBank Accession No. NC_006152; the complete genome of AAV-6 is provided in GenBank Accession No. NC_001862; the complete genome of AAV-7 is provided in GenBank Accession No. NC_006260; the complete genome of AAV-8 is provided in GenBank Accession No. NC_006261; the AAV-9 genome is provided in Gao et al., J. Virol., 78: 6381-6388 (2004); the AAV-10 genome is provided in Mol. Ther., 13(1): 67-76 (2006); and the AAV-11 genome is provided in Virology, 330(2): 375-383 (2004). The sequence of the AAV rh.74 genome is provided in U.S. Pat. No. 9,434,928, which is hereby incorporated herein by reference in its entirety. U.S. Pat. No. 9,434,928 also provide the sequences of the capsid proteins and a self-complementary genome. In one aspect, the genome is a self-complementary genome. Cis-acting sequences directing viral DNA replication (rep), encapsidation/packaging and host cell chromosome integration are contained within the AAV ITRs. Three AAV promoters (named p5, p19, and p40 for their relative map locations) drive the expression of the two AAV internal open reading frames encoding rep and cap genes. The two rep promoters (p5 and p19), coupled with the differential splicing of the single AAV intron (at nucleotides 2107 and 2227), result in the production of four rep proteins (rep 78, rep 68, rep 52, and rep 40) from the rep gene. Rep proteins possess multiple enzymatic properties that are ultimately responsible for replicating the viral genome.

[0127] The cap gene is expressed from the p40 promoter and encodes the three capsid proteins, VP1, VP2, and VP3. Alternative splicing and non-consensus translational start sites are responsible for the production of the three related capsid proteins. More specifically, after the single mRNA from which each of the VP1, VP2 and VP3 proteins are translated is transcribed, it can be spliced in two different manners: either a longer or shorter intron can be excised, resulting in the formation of two pools of mRNAs: a 2.3 kb- and a 2.6 kb-long mRNA pool. The longer intron is often preferred and thus the 2.3-kb-long mRNA can be called the major splice variant. This form lacks the first AUG codon, from which the synthesis of VP1 protein starts, resulting in a reduced overall level of VP1 protein synthesis. The first AUG codon that remains in the major splice variant is the initiation codon for the VP3 protein. However, upstream of that codon in the same open reading frame lies an ACG sequence (encoding threonine) which is surrounded by an optimal Kozak (translation initiation) context. This contributes to a low level of synthesis of the VP2 protein, which is actually the VP3 protein with additional N terminal residues, as is VP1, as described in Becerra S P et al., (December 1985), “Direct mapping of adeno-associated virus capsid proteins B and C: a possible ACG initiation codon”, Proceedings of the National Academy of Sciences of the United States of America, 82 (23): 7919-23; Cassinotti P et al., (November 1988), “Organization of the adeno-associated virus (AAV) capsid gene: mapping of a minor spliced mRNA coding for virus capsid protein 1”, Virology, 167(1): 176-84; Muralidhar S et al., (January 1994), “Site-directed mutagenesis of adeno-associated virus type 2 structural protein initiation codons: effects on regulation of synthesis and biological activity”, Journal of Virology, 68 (1): 170-6; and Trempe J P, Carter B J (September 1988), “Alternate mRNA splicing is required for synthesis of adeno-associated virus VP1 capsid protein”, Journal of Virology, 62 (9): 3356-63, each of which is herein incorporated by reference. A single consensus poly-A site is located at map position 95 of the AAV genome. The life cycle and genetics of AAV are reviewed in Muzyczka, Current Topics in Microbiology and Immunology, 158: 97-129 (1992). Non-limiting exemplary capsid proteins include an AAV 110 capsid protein, an AAV 204 capsid protein, an AAV 214 capsid protein, an AAV 214A capsid protein, an AAV 214e capsid protein, an AAV 214e8 capsid protein, an AAV 214e9 capsid protein, an AAV 214e10 capsid protein, an AAV ITB102_45 capsid protein, an AAV 214AB capsid protein, an AAV6 capsid protein, an AAV8 capsid protein, an AAV9 capsid protein and an AAV2 capsid protein according to Tables 1-3 of the disclosure. Additional non-limiting exemplary capsid proteins include those disclosed in WO2016081811, which is hereby incorporated herein by reference in its entirety and, in particular, for AAV capsid protein sequences.

[0128] Each VP1 protein contains a VP1 portion, a VP2 portion and a VP3 portion. The VP1 portion is the N-terminal portion of the VP1 protein that is unique to the VP1 protein. The VP2 portion is the amino acid sequence present within the VP1 protein that is also found in the N-terminal portion of the VP2 protein. The VP3 portion and the V3 protein have the same sequence. The VP3 portion is the C-terminal portion of the VP1 protein that is shared with the VP1 and VP2 proteins.

[0129] The VP3 protein can be further divided into discrete variable surface regions I-JX (VR—I-IX). Each of the variable surface regions (VRs) can comprise or contain specific amino acid sequences that either alone or in combination with the specific amino acid sequences of each of the other VRs can confer unique infection phenotypes (e.g., decreased antigenicity, improved transduction and/or tissue-specific tropism relative to other AAV serotypes) to a particular serotype as described in DiMatta et al., “Structural Insight into the Unique Properties of Adeno-Associated Virus Serotype 9” J. Virol., Vol. 86 (12): 6947-6958, June 2012, the contents of which are hereby incorporated herein by reference in their entirety.

[0130] AAV has unique features that make it attractive as a vector for delivering foreign DNA to cells, for example, in gene therapy. AAV infection of cells in culture is noncytopathic, and natural infection of humans and other animals is silent and asymptomatic. Moreover, AAV infects many mammalian cell types, allowing the possibility of targeting many different tissues in vivo. Moreover, AAV transduces slowly dividing and non-dividing cells, and can persist essentially for the lifetime of those cells as a transcriptionally active nuclear episome (extrachromosomal element). Furthermore, because the signals directing AAV replication and genome encapsidation are contained within the ITRs of the AAV genome, some or all of the internal approximately 4.3 kb of the genome (encoding replication and structural capsid proteins, rep-cap) may be replaced with foreign DNA to generate AAV vector genomes. The rep and cap proteins may be provided in trans. Another significant feature of AAV is that it is an extremely stable and hearty virus. It easily withstands the conditions used to inactivate adenovirus (56° to 65° C. for several hours), making cold preservation of AAV less critical. AAV may even be lyophilized. Finally, AAV-infected cells are not resistant to superinfection.

[0131] Multiple studies have demonstrated long-term (>1.5 years) recombinant AAV-mediated protein expression in muscle. See, Clark et al., Hum Gene Ther, 8: 659-669 (1997); Kessler et al., Proc Nat. Acad Sc. USA, 93: 14082-14087 (1996); and Xiao et al., J Virol, 70: 8098-8108 (1996). See also, Chao et al., Mol Ther, 2:619-623 (2000) and Chao et al., Mol Ther, 4:217-222 (2001). Moreover, because muscle is highly vascularized, recombinant AAV transduction has resulted in the appearance of transgene products in the systemic circulation following intramuscular injection as described in Herzog et al., Proc Natl Acad Sci USA, 94: 5804-5809 (1997) and Murphy et al., Proc Natl Acad Sci USA, 94: 13921-13926 (1997). Moreover, Lewis et al., J Virol, 76: 8769-8775 (2002) demonstrated that skeletal myofibers possess the necessary cellular factors for correct antibody glycosylation, folding, and secretion, indicating that muscle is capable of stable expression of secreted protein therapeutics. Recombinant AAV (rAAV) genomes of the invention comprise, consist essentially of, or consist of a nucleic acid molecule encoding a therapeutic protein or portion thereof (e.g., the ABCA4) and one or more AAV ITRs flanking the nucleic acid molecule. AAV DNA in the rAAV genomes may be from any AAV serotype for which a recombinant virus can be derived including, but not limited to, AAV serotypes AAV-1, AAV-2, AAV-3, AAV-4. AAV-5, AAV-6, AAV-7, AAV-8, AAV-9, AAV-10, AAV-11, AAV-12, AAV-13, AAV PHP.B and AAV rh74. Production of pseudotyped rAAV is disclosed in, for example, WO2001083692. Other types of rAAV variants, for example rAAV with capsid mutations, are also contemplated. See, e.g., Marsic et al., Molecular Therapy, 22(11): 1900-1909 (2014), The nucleotide sequences of the genomes of various AAV serotypes are known in the art.

### AAV Vector Particles, Capsid Proteins, and AAV Vectors

[0132] Provided herein are AAV vector particles, AAV vectors, and capsid proteins that find use in delivering a variety of therapeutic payloads, including nucleic acids and proteins useful in the treatment of disease. The methods and compositions disclosed herein may be used to deliver to a subject transgenes that are larger than the packaging capacity of about 4.7 kb typical of single AAV vector genome. Delivery of the larger transgenes may be achieved by delivering portions of the transgene in two or more AAV vector particles and recombining the portions in a cell to provide a completed transgene (for example, as illustrated in FIG. 1A and FIG. 1B). In a novel preferred approach described herein portions of transgenes are joined by Cre-lox mediated recombination Advantageously, the design of AAV vector genomes ensures that the 5′ portion of the transgene is located upstream of the 3′ portion of the transgene after recombination. Recombination sites may also dictate the directionality of the recombination event (e.g., to reduce or eliminate reverse recombination). In a further advantage, the recombination event may also remove the promoter operably linked to the Cre recombinase protein, leaving a promoter-less vector genome comprising the Cre recombinase, thereby preventing further, undesired expression of the Cre recombinase in the host cell.

[0133] AAV Capsid Proteins

[0134] The disclosure provides AAV particles and AAV vector genomes for multipartite (e.g., bipartite) delivery of large genes. In embodiments, two AAV particles are used for bipartite delivery: a first AAV particle comprises a 5′ portion of the gene, and a second AAV particle comprises a 3′ portion of the gene. The first and second AAV particles may have the same capsid protein or a different capsid protein.

[0135] The capsid protein may comprise, or consist of, any one of the amino acid sequences listed in Table 1, or a sequence having up to 1, 2, 3, 4, 5, 6, 7, 8, 9, or 10 amino acids mutated, deleted or added as compared to, any one of the amino acid sequence listed in Table 1. Optionally, up to 220 amino acids, up to 30 amino acids, or up to 40 amino acids may be mutated, deleted or added compared to these sequences. The capsid protein may be encoded by any one of the nucleic acid sequences listed in Table 1, or a sequence having up to 5, up to 10, up to 30, or up to 60 nucleotide changes to any one of the nucleic acid sequences listed in Table 1.

TABLE 1
VP1 Capsid Proteins

| Amino Acid SEQ | Nucleic Acid SEQ | AAV Capsid Protein |
|---|---|---|
| ID NO: | ID NO: | Name |
| 1 | 98 | AAV 110 |
| 2 | 15 | AAV 204 |
| 3 | 18 | AAV 214 |
| 30 | 19 | AAV 214A |
| 31 | 20 | AAV 214e |
| 32 | 21 | AAV 214e8 |
| 33 | 22 | AAV 214e9 |
| 34 | 23 | AAV 214e10 |
| 49 | 47 | AAV ITB102_45 |
| 84 | 82 | AAV 214AB |
| 63 | — | AAV6 |
| 67 | 66 | AAV8 |
| 71 | 70 | AAV9 |
| 196 | 197 | AAV2 |
| 205 | — | AAV5 |
| 206 | — | AAV7 |

[0136] In embodiments, the AAV capsid protein comprises, consists essentially of, or consists of an amino acid sequence of SEQ ID NOs: 1-3, 30-34, 49, 63, 67, 71, 84, or 196, or a sequence having up to 1, 2, 3, 4, 5, 6, 7, 8, 9, or 10 amino acids different from SEQ ID NOs: 1-3, 30-34, 49, 63, 67, 71, 84, or 196. Also provided are polynucleotides encoding these VP1 proteins. Polynucleotides encoding the VP1 proteins may comprise, consist essentially of, or consist of the sequence of SEQ ID NOs: 15, 18-23, 47, 66, 70, 82, 98, and 197 or a sequence having up to 5, up to 10, or up to 30 nucleotide changes to SEQ ID NOs: 15, 18-23, 47, 66, 70, 82, 98, and 197.

[0137] In embodiments, the AAV capsid protein is an AAV-110 capsid protein (SEQ ID NO: 1), AAV204 capsid protein (SEQ ID NO: 2), AAV214 capsid protein (SEQ ID NO: 3) or AAV ITB102_45 capsid protein (SEQ ID NO: 49). In embodiments, the AAV capsid protein is a variant of the AAV214 capsid protein. In embodiments, the AAV capsid protein is AAV214A (SEQ ID NO: 30), AAV-214-AB (SEQ ID NO: 84), AAV214e (SEQ ID NO: 31), AAV214e8 (SEQ ID NO: 32), AAV214e9 (SEQ ID NO: 33) or AAV214e10 (SEQ ID NO: 34). In embodiments, the AAV capsid protein is an AAV9 capsid protein (SEQ ID NO: 71.

[0138] Sequences for exemplary VP2 and VP3 proteins are provided in Table 2 and Table 3. Given the VP2 and VP3 sequences, the VP1 portions may be determined by alignment with the full, VP1 protein sequence.

TABLE 2
VP2 Capsid Proteins

| Amino Acid SEQ ID NO: | Name |
|---|---|
| 35 | 214 |
| 36 | 214A |
| 37 | 214e |
| 38 | 214e8 |
| 39 | 214e9 |
| 40 | 214e10 |
| 85 | 214AB |
| 50 | ITB102_45 |

[0139] An exemplary nucleic acid for ITB102_45 is SEQ ID NO: 47. Exemplary nucleic acids for the other capsid VP2 portions may be derived from the corresponding portions of the VP1 capsid protein nucleic acids.

TABLE 3
VP3 Capsid proteins

| Amino Acid SEQ ID NO: | NA SEQ ID NO: | AAV Capsid Name |
|---|---|---|
| 17 | 16 | 204 |
| 41 | 24 | 214 |
| 42 | 25 | 214A |
| 43 | 26 | 214e |
| 44 | 27 | 214e8 |
| 45 | 28 | 214e9 |
| 46 | 29 | 214e10 |
| 86 | 83 | 214AB |
| 51 | 48 | ITB102_45 |

[0140] The VP3 proteins of AAV214, AAV214e, AAV214e8, AAV214e9, AAV214e10 have the same amino acid (SEQ ID NO:41) and nucleic acid (SEQ ID NO: 24) sequences.

[0141] In embodiments, the AAV VP2 proteins comprise, consist essentially of or consist of an amino acid sequence of any one of SEQ ID NOs: 35-40, 50 or 85, or a sequence having up to 1, 2, 3, 4, 5, 6, 7, 8, 9, or 10 amino acids different from SEQ ID NOs: 35-40, 50 or 85. Also provided are polynucleotides encoding these VP2 proteins. In embodiments, the polynucleotide encoding the VP2 protein comprises, consists essentially of, or consists of the sequence of SEQ ID NO: 47, or a sequence having up to 5, up to 10, or up to 30 nucleotide changes to SEQ ID NO: 47.

[0142] In embodiments, the AAV VP3 proteins comprise, consist essentially of, or consist of an amino acid sequence of SEQ ID NOs: 17, 41-46, 51, or 86, or a sequence having tip to 1, 2, 3, 4, 5, 6, 7, 8, 9, or 10 amino acids different from SEQ ID NOs: 17, 41-46, 51, or 86. Also provided are polynucleotides encoding these VP3 proteins. In embodiments, the polynucleotides encoding the proteins that comprise, consist essentially of, or consist of the sequence of SEQ ID NOs: 16, 24-29, 48 and 83, or a sequence having tip to 5, up to 10, or tip to 30 nucleotide changes to SEQ ID NOs: 16, 24-29, 48 and 83.

[0143] In embodiments, the AAV capsid protein is a chimeric protein. In embodiments, a VP1, VP2, or VP3 portion of the AAV capsid protein disclosed herein may be replaced with a VP1, VP2, or VP3 portion from a different AAV capsid protein disclosed herein.

[0144] In embodiments, provided herein is an AAV capsid protein comprising a leucine residue at amino acid position 129, an asparagine residue at amino acid position 586 and a glutamic acid residue at amino acid position 723, wherein the amino acid positions in the AAV capsid protein are numbered with respect to amino acid positions in the amino acid sequence of SEQ ID NO: 2. In some cases, the protein comprises the amino acid sequence of SEQ ID NO: 2. In other cases, these amino acids may be introduced into other capsid proteins.

[0145] In embodiments, provided herein is an AAV VP1 capsid protein comprising a VP1 portion, a VP2 portion and a VP3 portion, wherein the VP1 portion comprises a leucine (L) residue at amino acid 129, wherein the VP2 portion comprises a threonine (T) or asparagine (N) residue at amino acid 157 and a lysine (K) or serine (S) residue at amino acid 162, and wherein the VP3 portion comprises asparagine (N) residue at amino acid 223, an alanine (A) residue at amino acid 224, a histidine (H) residue at amino acid 272, a threonine (T) residue at amino acid 410, a histidine (H) residue at amino acid 724 and a proline (P) residue at amino acid 734, wherein amino acid positions in the AAV capsid protein are numbered with respect to amino acid positions in the amino acid sequence of SEQ ID NO: 3 (i.e., VP1 capsid subunit numbering).

[0146] In embodiments, the VP1 portion further comprises an aspartic acid (D) or alanine (A) residue at amino acid position 24, wherein amino acid positions in the AAV capsid protein are numbered with respect to amino acid positions in the amino acid sequence of SEQ ID NO: 3. In embodiments, the VP2 portion further comprises one or more of (i) a proline (P) residue at amino acid 148; (ii) an arginine (R) residue inserted at amino acid 152; (iii) an arginine (R) residue at amino acid 168; (iv) an isoleucine (I) residue at amino acid 189; and (v) a serine (S) residue at amino acid 200, wherein amino acid positions in the AAV capsid protein are numbered with respect to amino acid positions in the amino acid sequence of SEQ ID NO: 3.

[0147] In embodiments, one or more variable regions I through IX in the disclosed VP3 portion capsid proteins may be removed and replaced with alternative regions. Suitable alternatives are identified in Table 4 below. The location for these, as well as the identity of additional alternatives may be identified by alignment to SEQ ID NO:41. In embodiments, one or more VRs may have an insertion of 1, 2 or 3 amino acids. In embodiments, one or more VRs may have a deletion of 1, 2 or 3 amino acids.

TABLE 4
VR Alternatives

| VR | Sequence |
|---|---|
| I | SASTGAS (SEQ ID NO. 52); NSTSGGSS (SEQ ID |
| | NO. 53); SSTSGGSS (SEQ ID NO: 87) |
| II | DNNGVK (SEQ ID NO. 54) |
| III | NDGS (SEQ ID NO. 55) |
| IV | INGSGQNQQT (SEQ ID NO. 56) |
| VI | RVSTTTGQNNNSNFAWTA (SEQ ID NO. 57) |
| VII | HKEGEDRFFPLSG (SEQ ID NO. 58); |
| VIII | ADNLQQQNTAPQI (SEQ ID NO. 60); |
| IX | NYYKSTSVDF (SEQ ID NO. 61). |

[0148] The disclosure provides nucleic acids encoding any one of the AAV capsid proteins disclosed herein. The disclosure also provides vectors comprising any one of the nucleic acids disclosed herein. The AAV may be an AAV2, an AAV8, or an AAV9 serotype.

[0149] AAV Vectors

[0150] AAV vectors supply the nucleic acid that becomes encapsidated into the AAV vector particle including elements involved in controlling expression of the nucleic acids in the subject, as well as ITRs to facilitate encapsidation. In embodiments, the AAV vector comprises an AAV vector genome of the disclosure. In embodiments, the AAV vectors disclosed herein comprise at least one heterologous nucleic acid (HNA) sequence or a portion thereof, which, when expressed in a cell of a subject and recombined with the remaining portion of an HNA sequence, encodes a transgene that treats a disease or disorder. Thus, the HNA A sequence comprises a transgene, or a portion thereof. In embodiments, the AAV vectors comprise at least one ITR sequence and at least one transgene or portion thereof. In embodiments, the AAV vectors comprise at least one ITR sequence and a portion of one transgene. In embodiments, the transgene encodes a therapeutic protein or a therapeutic RNA.

[0151] The present disclosure provides methods of expressing transgenes encoded by genes above a size limit. The size limit is determined by the packaging capacity of the viral particles carrying the heterologous nucleic acid sequence and, for most of AAV viral vectors, the size limit of the encapsidated vector genome is typically about 4.7 kb. The present disclosure provides approaches for delivering to host cells and expressing transgenes that are up to about 8 kb, up to about 7.9 kb, up to about 7.8 kb, up to about 7.7 kb, up to about 7.6 kb, up to about 7.5 kb, or up to about 7.4 kb, using AAV viral particles. The length of the transgene suitable for the bipartite gene delivery approach is between about 4.0 kb to about 8.0 kb; for example between about 4.1 kb to about 79 kb, between about 4.2 kb to about 7.8 kb, between about 4.3 kb to about 7.7 kb, between about 4.4 kb to about 7.7 kb, between about 4.5 kb to about 7.7 kb, or between about 4.6 kb to about 7.7 kb. In embodiments, the present disclosure provides multipartite gene delivery approaches for delivering to host cells and expressing transgenes that are up to about 8 kb, about 9 kb, about 10 kb, about 11 kb, about 12 kb, about 13 kb, about 14 kb, about 15 kb, about 16 kb, about 17 kb, about 18 kb, about 19 kb, about 20 kb, or any values in between.

[0152] Previous approaches for delivering a transgene above the size limit of the AAV system include using homologous recombination mediated by the host cell's own cellular machinery. However, the efficiency of homologous recombination varies widely among different organisms and cell types, and endogenous homologous recombination process is error-prone.

[0153] The novel methods described herein employ exogenous recombinases to mediate efficient and precise recombination between the AAV vector genomes encoding different parts of the transgene, which overcomes the problems associated with endogenous homologous recombination. In embodiments, the exogenous recombinase is a Cre recombinase. Cre recombinase belongs to the integrase family of site-specific recombinases. It catalyzes recombination between two recognition sites called Lox sites. A Lox site is typically a 34 bp polynucleotide sequence consisting of a core spacer region of 8 bp and two 13 bp flanking sequences (the recognition regions). The asymmetric core sequence defines an orientation to the Lox site. By using Cre recombination approach methods as disclosed herein, we obtained highly efficient recombination, regardless of the cellular environment and in the absences of additional co-factors. Other exogenous recombinases such as yeast Flippase (Flp) may be used.

[0154] The multipartite viral delivery systems of the disclosure use exogenous recombinase (e.g., Cre recombinase) to mediate the recombination and integration of different portions of the transgene of interest via specific recombination sites within the AAV vector genomes that are delivered to the host cell inside the viral vector. In embodiments, three or more portions of a transgene of interest can be delivered using multipartite viral delivery system and form the complete transgene in the host cell using the same strategy.

[0155] An illustrative approach for delivering to host cells and expressing a transgene above the size limit of a single AAV vector genome is depicted in FIG. 1A. The transgene is split into two parts: a 5′ portion of the transgene, and a 3′ portion of the transgene. The 5′ portion of the transgene is incorporated into the first AAV vector genome, and the 3′ portion of the transgene is incorporated into the second AAV vector genome. The first AAV vector genome also comprises an HNA sequence encoding a recombinase (Rec); for example a Cre recombinase. Once expressed in cells, the recombinase mediates recombination between the first AAV vector genome and the second AAV vector genome through the recombination sites (RS) in the first and second AAV vector genomes, resulting in the formation of two recombined nucleic acids as indicated in FIG. 1A. The first recombined nucleic acid comprises both the 5′ and the 3′ portions of the transgene which, once transcribed, can be joined together during RNA splicing due to the presence of splice donor (SD) and splice acceptor (SA) sites, resulting in the expression of full-length transgene. The second recombined nucleic acid does not comprise a promoter region, and therefore expression of the recombinase from the second recombined nucleic acid is suppressed.

[0156] A first AAV vector genome may comprise, in 5′ to 3′ orientation:
[0157] a. a 5′ AAV inverted terminal repeat (ITR);
[0158] b. a promoter;
[0159] c. the 5′ portion of the transgene;
[0160] d. a splice donor (SD) site;
[0161] e. a recombination site (RS);
[0162] f. optionally, a nucleic acid sequence encoding an internal cleavage (IC) polypeptide or an internal ribosome entry site (IRES);
[0163] g. a nucleic acid sequence encoding a recombinase, optionally with a nuclear localization sequence (NL S);
[0164] h. a poly-A site (pA); and
[0165] i. a 3′ AAV inverted terminal repeat.

[0166] Typically, there is no stop codon between the 5′ portion of the transgene and the recombinase nucleic acid, meaning that the HNA region comprising the 5′ portion of the transgene and the gene encoding the recombinase (optionally with a nuclear localization sequence) forms a continuous ORF (i.e., are in the same reading frame).

[0167] A second AAV vector genome may comprise, in 5′ to 3′ orientation:
[0168] a. a 5′ AAV inverted terminal repeat;
[0169] b. a recombination site;
[0170] c. a splice acceptor (SA) site;
[0171] d. the 3′ portion of the transgene ORF;
[0172] e. a poly-A site;
[0173] f and a 3′ AAV inverted terminal repeat.

[0174] Elements of the first and second AAV vector genomes facilitate production of the full-length transgene. When both the first AAV vector genome and the second AAV vector genome are present in the same cell, a recombinase is expressed under the control of a promoter in the first AAV vector genome. The recombinase mediates recombination of the first AAV vector genome and the second AAV vector genome via the recombination site in the AAV vector genome and the recombination site in the second AAV vector genome, resulting in the formation of two recombined nucleic acids. The first recombined nucleic acid comprises both the 5′ and 3′ portions of the transgene, separated by splice donor and acceptor sites. Following transcription and RNA maturation, full-size mRNA is produced from the first recombined nucleic acid. The second recombined nucleic acid comprises the residual nucleic acid portions including the recombinase. Notably the recombinase has little or no expression from the second recombined nucleic acid as it is no longer operably linked to a promoter because the promoter is absent from the nucleic acid. See FIG. 1A.

[0175] Three or more portions of the transgene can be delivered to a host cell using a multipartite viral delivery system, and recombined to allow expression of a complete transgene. An illustrative approach for delivering three portions of the transgene is depicted in FIG. 1B, and the same strategy can be used to deliver a transgene using more than three portions. Briefly, in FIG. 1B, a 1st portion of the transgene is incorporated into a first AAV vector genome, a 2nd portion of the transgene is incorporated into a second AAV vector genome, and a 3rd portion of the transgene is incorporated into a third AAV vector genome. The AAV vector genomes are then encapsidated to produce AAV vector particles which are delivered to the host cells and introduce the AAV vector genomes. Similar to the design in FIG. 1A, the first AAV vector genome in FIG. 11B comprises a promoter, a first splice donor (SD1) site, a recombination site RS1, optionally a nucleic acid sequence encoding an internal cleavage (IC) polypeptide or an internal ribosome entry site (IRES), a nucleic acid sequence encoding a recombinase (Rec) optionally with a nuclear localization sequence (NLS), and a poly-A site (pA). The second AAV vector genome also comprises a recombination site RS1′, a first splice acceptor (SAL) site, a second splice donor (SD2) site, and a recombination site RS2. The third AAV vector genome comprises a recombination site RS2′, a second splice acceptor (SA2) site and a poly-A site.

[0176] Once the three AAV vector genomes are delivered in the same host cell, the expression of recombinase (e.g, Cre recombinase) mediates the recombination between RS1 and RS1′ sites and the recombination between RS2 and RS2′ sites. In embodiments, the RS1 and RS1′ sites are orthogonal to the RS2 and RS2′ sites (i.e., minimal to no recombination between RS1/RS1′ and RS2/RS2′). As a non-limiting example, when the recombinase is a Cre recombinase, the RS1 and RS1 can be LoxP sites and the RS2 and RS2′ can be LoxN sites. After the recombination, an HNA comprising all three portions of the transgene is formed, and its precursor mRNA transcript can undergo RNA splicing mediated by the SD1/SA1 splicing pair and the SD2/SA2 splicing pair to form a mature mRNA transcript that comprises the integrated transgene without any of the recombination sites. In embodiments, the SD1/SA1 splicing pair and the SD2/SA2 splicing pair are orthogonal to each other (i.e., no splicing occurs between SD1/SA2 pair or SD2/SA1 pair), thereby ensuring that all portions of the transgene are retained in their correct positions within the mature mRNA transcript.

[0177] In embodiments, the recombinase is cleaved from the N-terminal portion of the protein via an internal cleavage polypeptide. Expression of the recombinase may be driven by an internal ribosome entry site (IRES).

[0178] The first recombined nucleic acid may comprise, in 5′ to 3′ orientation: a 5′ AAV inverted terminal repeat (ITR); a promoter; a 5′ portion of the transgene, a splice donor (SD) site; a recombination site (RS) formed by the recombination process; a splice acceptor (SA) site; a 3′ portion of the transgene; a poly-A site (pA); and a 3′ AAV inverted terminal repeat. The promoter drives efficient transcription of the HNA sequence comprising the transgene, and the 5′ portion and 3′ portion of the transgene are joined together after splicing of the RNA transcript via the splice donor and acceptor sites, which leads to formation of mRNA transcript of a full-length transgene.

[0179] The second recombined nucleic acid may comprise, in 5′ to 3′ orientation: a 5′ AAV inverted terminal repeat (ITR); a recombination site (RS) formed by the recombination process; optionally, an HNA sequence encoding the internal cleavage (IC) polypeptide or an internal ribosome entry site (IRES); a nucleic acid sequence encoding the recombinase, optionally with a nuclear localization sequence (NLS); a poly-A site (pA); and a 3′ AAV inverted terminal repeat. In embodiments, the gene encoding the recombinase located in the second recombined nucleic acid cannot be efficiently transcribed due to lack of promoter. As a result, in embodiments, little or no stable expression of the recombinase can be detected in cells transduced with both the first and the second AAV vector genomes.

[0180] The recombinase may be a Cre recombinase. The Cre recombinase may comprise, consist essentially of, or consist of the amino acid sequence of SEQ ID NO: 164 or may have at least about 70%, at least about 75%, at least about 80%, at least about 85%, at least about 90%, at least about 95% identity or at least about 99% identity to SEQ ID NO: 164. Optionally, the Cre recombinase may have 1, 2, 3, 4, 5, 6, 7, 8, 9, or up to 10 amino acids different than SEQ ID NO: 164.

[0181] The Cre recombinase may be fused to a nuclear localization sequence (NL S) The location of the NLS may be at the N-terminus, the C-terminus, or in the middle of the Cre recombinase. The NLS may have the amino acid sequence of PKKKRKV (SEQ ID NO: 165), or up to 1, 2, or 3 amino acids variation from SEQ ID NO: 165. The Cre recombinase with NLS may comprise, consist essentially of, or consist of the amino acid sequence of SEQ ID NO: 166 or may have at least about 70%, at least about 75%, at least about 80%, at least about 85%, at least about 90%, at least about 95% identity or at least about 99% identity to SEQ ID NO: 166. The Cre recombinase with NLS maybe encoded by a nucleotide sequence having at least about 70%, at least about 75%, at least about 80%, at least about 85%, at least about 90%, at least about 95/o identity, or 100% identity to SEQ ID NO: 167.

[0182] The recombination sites recognized by the Cre recombinase may comprise one or more LoxP (locus of X-over P1) sequences. Examples of LoxP sequences are listed in Table below. A representative LoxP sequence is 34 bp in length and comprises an asymmetric 8 bp spacer region in between two sets of 13 bp recognition regions. In embodiments, the LoxP sequence comprises a spacer region having the nucleotide sequence of ATGTATGC. The pairing of recombination sites (one in the first AAV vector genome and the other in the second AAV vector genome) may promote unidirectional recombination and/or prevent backwards recombination.

[0183] The recombination site recognized by the Cre recombinase may comprise, consist essentially of, or consist of one or more variant Lox site comprising a spacer region sequence that is different from the canonical sequence (ATGTATGC). In embodiments, the variant Lox site is orthogonal to the LoxP site (i.e., no cross-recombination between the variant Lox site and the LoxP site). In embodiments, the Lox site is a loxN site comprising a spacer region sequence of GTATACCT. In embodiments, the Lox site is a lox2272 site comprising a spacer region sequence of AAGTATCC. In embodiments, the Lox site is a lox511 site comprising a spacer region sequence of ATGTATAC. In embodiments, two or more Lox sites comprising different spacer region sequences are used and these Lox sites are orthogonal to each other. In embodiments, the Lox sites undergo recombination with Lox sites comprising the same spacer region sequence, but are not cross-compatible. More discussions about orthogonal Lox sites can be found in Livet et al. Nature, 2007 Nov. 1, 450(7166):56-62 and Missirlis et al. BMC Genomics, 2006 Apr. 4, 7:73, each of which is incorporated herein by reference in its entirety. Exemplary variant Lox site sequences are provided in Table 5 below.

TABLE 5
Exemplary LoxP Sequences and Variant Lox Site Sequences

| | 13 bp | 8 bp | 13 bp | |
|---|---|---|---|---|
| | Recognition | Spacer | Recognition | |
| Name | Region | Region | Region | SEQ ID NO |
| Wild- | ATAACTTCGTATA | ATGTATGC | TATACGAAGTTAT | SEQ ID NO: 168 |
| Type | | | | |
| Lox 511 | ATAACTTCGTATA | ATGTATaC | TATACGAAGTTAT | SEQ ID NO: 169 |
| Lox 5171 | ATAACTTCGTATA | ATGTgTaC | TATACGAAGTTAT | SEQ ID NO: 170 |
| Lox 2272 | ATAACTTCGTATA | AaGTATcC | TATACGAAGTTAT | SEQ ID NO: 171 |
| M2 | ATAACTTCGTATA | AgaaAcca | TATACGAAGTTAT | SEQ ID NO: 172 |
| M3 | ATAACTTCGTATA | taaTACCA | TATACGAAGTTAT | SEQ ID NO: 173 |
| M7 | ATAACTTCGTATA | AgaTAGAA | TATACGAAGTTAT | SEQ ID NO: 174 |
| M11 | ATAACTTCGTATA | cgaTAcca | TATACGAAGTTAT | SEQ ID NO: 175 |
| Lox 71 | TACCGTTCGTATA | NNNTANNN | TATACGAAGTTAT | SEQ ID NO: 176 |
| Lox 66 | ATAACTTCGTATA | NNNTANNN | TATACGAACGGTA | SEQ ID NO: 177 |
| Lox 71 | TACCGTTCGTATA | ATGTATGC | TATACGAAGTTAT | SEQ ID NO: 178 |
| Lox 66 | ATAACTTCGTATA | ATGTATGC | TATACGAACGGTA | SEQ ID NO: 179 |
| LoxN | ATAACTTCGTATA | GTATACCT | TATACGAAGTTAT | SEQ ID NO: 207 |

[0184] The recombination site in the first AAV vector genome may comprise, consist essentially of, or consist of a Lox 71 sequence; for example, SEQ ID NO: 178, and the recombination site in the second AAV vector genome may comprise, consist essentially of, or consist of a Lox 66 sequence; for example, SEQ ID NO: 179.

[0185] The first AAV vector genome may encode an internal cleavage polypeptide to facilitates the cleavage of the recombinase from the rest of the polypeptide. The nucleic acid encoding the internal cleavage polypeptide may be located about 1-1000 bp upstream of the 5′ end of the nucleic acid portion encoding the recombinase; for example, about 1-500 bp, about 1-300 bp, about 1-200 bp, about 1-150 bp, about 1-100 bp, about 1-50 bp, about 1-30 bp, about 1-20 bp, or about 1-10 bp upstream of the 5′ end of the nucleic acid portion encoding the recombinase.

[0186] The internal cleavage polypeptide may be a 2A self-cleaving peptide. Suitable examples of 2A self-cleaving peptide are listed in Table 6 below. Suitable examples include, an internal cleavage peptide having an amino acid sequence of SEQ ID NO: 184, which is encoded by a nucleic acid having the sequence of SEQ ID NO: 185. The C-terminal residues of the internal cleavage peptide may overlap with the N-terminal residues of the Cre recombinase with NLS.

TABLE 6
Exemplary 2A Self-cleaving Peptides

| Name | Sequence | SEQ ID NO |
|---|---|---|
| T2A | EGRGSLLTCGDVEENPGP | SEQ ID NO: 180 |
| P2A | ATNFSLLKQAGDVEENPGP | SEQ ID NO: 181 |
| E2A | QCTNYALLKLAGDVESNPGP | SEQ ID NO: 182 |
| F2A | VKQTLNFDLLKLAGDVESNPGP | SEQ ID NO: 183 |

[0187] In embodiments, little or no stable expression of the recombinase can be detected in cells transduced with both the first and the second AAV vector genomes. In embodiments, no expression of the recombinase can be detected by western blot in cells after about 1 hour, about 3 hours, about 6 hours, about 12 hours, about 24 hours, about 48 hours, about 3 days, about 4 days, about 5 days, about 6 days, about 1 week, about 2 weeks, about 3 weeks, or about 1 month, post transduction with both AAV vector genomes. In embodiments, no expression of the recombinase can be detected by western blot in cells after about 48 hours post transduction with both AAV vector genomes. Western blot analysis of the recombinase can be performed by a skilled artisan using commercially available antibodies. For example, the expression level of Cre recombinase can be analyzed by Western blot using rabbit anti-Cre mAb (Cell signaling technology #15036) at 1:10,000 dilution following the protocol described in Example 3.

[0188] In embodiments, little or no stable expression of the mRNA encoding the recombinase can be detected in cells transduced with both the first and the second AAV vector genomes. In embodiments, no expression of the mRNA encoding the recombinase can be detected by quantitative PCR (qPCR) in cells after about 1 hour, about 3 hours, about 6 hours, about 12 hours, about 24 hours, about 48 hours, about 3 days, about 4 days, about 5 days, about 6 days, about 1 week, about 2 weeks, about 3 weeks, or about 1 month, post transduction with both AAV vector genomes. In embodiments, no expression of the mRNA encoding the recombinase can be detected by qPCR in cells after about 1 week post transduction with both AAV vector genomes.

[0189] The first AAV vector genome may comprise an internal ribosome entry site (IRES) to facilitate expression of a downstream recombinase.

[0190] Splice donor (SD) and splice acceptor (SA) sites can be used to remove portions of an mR NA transcript. The splice donor (SD) site may be located downstream of the 5′ portion of the transgene in an AAV vector genome. For example, the splice donor (SD) site may be about 1-500 bp, about 1-300 bp, about 1-200 bp, about 1-150 bp, about 1-100 bp, about 1-50 bp, about 1-30 bp, about 1-20 bp, or about 1-10 bp downstream of the 5′ portion of the transgene.

[0191] The splice acceptor (SA) site may be located upstream of the 3′ portion of the transgene in an AAV vector genome. For example, about 1-500 bp, about 1-300 bp, about 1-200 bp, about 1-150 bp, about 1-100 bp, about 1-50 bp, about 1-30 bp, about 1-20 bp, or about 1-10 bp upstream of the 3′ portion of the transgene.

[0192] The splice donor (SD) site and the splice acceptor (SA) sites may be located within different AAV vector genomes, respectively, such that, after the recombination between the first and the second AAV vector genomes, the mRNA transcript comprising the 5′ portion of the transgene and the 3′ portion of the transgene can be processed to form a mature mRNA transcript comprising a continuous full-length transgene. See FIG. 1A.

[0193] The splice donor (SD) site may comprise, consist essentially of, or consist of the nucleotide sequence of SEQ ID NO: 186, or a sequence having tip to 1, up to 3, up to 5, or up to 10 nucleotide changes to SEQ ID NO 186. The splice acceptor (SA) site may comprise, consist essentially of, or consist of the nucleotide sequence of SEQ ID NO: 187, or a sequence having up to 1, up to 3, up to 5, or up to 10 nucleotide changes to SEQ ID NO: 187.

[0194] Control of transgene expression in the host cell may be regulated by regulatory elements contained within the AAV vector genome, including promoter sequences, and poly-A sites. The AAV vector may also encode a signal peptide. In embodiments, the AAV vector genomes have 5′ and 3′ inverted terminal repeats (ITRs). The 5′ ITR is located upstream of a promoter, which in turn is upstream of the transgene. In embodiments, the 5′ and 3′ ITR have the same sequence. In embodiments, they have a different sequence. In embodiments, an AAV vector genome of the disclosure may comprise, in 5′ to 3′ orientation, a first (5′) ITR, a promoter, a transgene, a poly-A site, and a second (3′) ITR.

[0195] The HNA (for example, an HNA comprising a transgene or portion thereof) may be operably linked to a constitutive promoter. The constitutive promoter can be any constitutive promoter known in the art and/or provided herein. In embodiments, the constitutive promoter comprises, consists essentially of, or consists of a Rous sarcoma virus (RSV) LTR promoter (optionally with the RSV enhancer), a cytomegalovirus (CMV) promoter, an SV40 promoter, a dihydrofolate reductase promoter, a beta-actin promoter, a phosphoglycerol kinase (PGK) promoter, a U6 promoter, an H1 promoter, a hybrid chicken beta actin promoter, a MeCP2 promotor, an H1 promoter, a U1a promoter, a mMeP418 promoter, a mMeP426 promoter, a minimal MeCP2 promoter, a CAG promoter, or an F1 promoter. It is known in the art that the nucleotide sequences of such promoters may be modified in order to increase or decrease the efficiency of mRNA transcription. See, e.g., Gao et al. (2018) Mol. Ther.: Nucleic Acids 12:135-145 (modifying TATA box of 7SK, U6 and H1 promoters to abolish RNA polymerase III transcription and stimulate RNA polymerase II-dependent mRNA transcription). In embodiments, the HNA sequence is operably linked to a tissue-specific control promoter, or an inducible promoter. In embodiments, the tissue-specific control promoter is a central nervous system (CNS) cell-specific promoter, a lung-specific promoter, a skin-specific promoter, a muscle-specific promoter, a liver-specific promoter, or an eye-specific promoter. In embodiments, the tissue-specific control promotor comprises, consists essentially of, or consists of an eye-specific promoter. In embodiments, the tissue-specific control promoter comprises, consists essentially of, or consists of a human rhodopsin kinase (RK) promoter, a human interphotoreceptor binding protein promoter (IRBP), a human red/green opsin promoter (pR2.1), a human blue opsin promoter (HB), a mouse opsin promoter (mOP), a mouse short wave opsin promoter (mBP) (short wave opsin promoters may also be referred to as S-opsin or blue opsin promoters), a human rod cGMP phosphodiesterase β-subunit promoter (3PDE), a VMD2 promoter, or an mRho promoter.

[0196] A promoter used herein may comprise, consist essentially of or consist of a polynucleotide having the sequence of SEQ ID NO: 96 (mouse U1 promoter) or a SEQ ID NO: 97 (a H1 promoter). The promoter may be a U1a or U1b promoter, EF1 promoter, or CBA (chicken beta-actin). The promoter may be a Human Rhodopsin Kinase (RK) promoter (SEQ ID NO: 188). The promoter may comprise, consist essentially of or consist of any one of the nucleic acid sequences listed in Table 7, or a sequence having tip to 5, up to 10, or up to 30 nucleotide changes to any one of the nucleic acid sequences listed in Table 7.

TABLE 7

| | Nucleic acid |
|---|---|
| Promoter name | SEQ ID No. |
| Mouse U1a promoter | 152 |
| Polymerase III H1 mutant promoter | 153 |
| Chicken β-actin hybrid promoter CBh (CBh promoter | 154 |
| consists of CMV enhancer, CBA promoter, first CBA | |
| exon and partial intron) | |
| MeCP2 min promoter sequence | 155 |
| MeCP2 promoter sequence | 156 |
| MeCP418 promoter sequence | 157 |
| MeCP426 promoter sequence | 158 |
| VMD2 promoter | 159 |
| PDE6b promoter | 160 |
| mRho promoter | 161 |
| CMV promoter | 162 |
| UbC promoter | 163 |
| Human Rhodopsin Kinase (RK) promoter | 188 |
| Human Interphotoreceptor Binding Protein (IRBP) | 198 |
| promoter | |
| Human Red/Green Opsin promoter (pR2.1) | 199 |
| Human Rod cGMP Phosphodiesterase β-subunit | 200 |
| promoter (βPDE) | |

[0197] In embodiments, the H-NA sequence is operably liked to an additional regulatory element. The additional regulatory element can be a woodchuck hepatitis virus post-transcriptional regulatory element (“WPRE”). In embodiments, AAV vectors may comprise regulatory components suitable for growth and culture of the vector in a bacterial host for vector production purposes. For example, the vector may comprise genes for antibiotic resistance, and maintenance of the plasmid in bacteria, as well as associated regulatory elements to control protein expression in bacteria.

[0198] In embodiments, the HNA sequence is operably linked to a poly adenylation (poly-A) site. The poly-A site comprises, consists essentially of or consists of an MeCP2 poly-A site, a retinol dehydrogenase 1 (RDH1) poly-A site, a bovine growth hormone (BGH) poly-A site, an SV40 poly-A site, a SPA49 poly-A site (SEQ ID NO: 189), a sNRP-TK65 poly-A site, a sNRP poly-A site, or a TK65 poly-A site. An exemplary SPA49 poly-A sequence is described in Ostedgaard et al., Proc. Nat'l Acad. Sci. USA (Feb. 22, 2005) 102:2952-2957, incorporated herein by reference.

### Heterologous Nucleic Acids (HNA)

[0199] The AAV viral vectors disclosed herein infect and deliver one or more heterologous nucleic acids (HNA) to target tissues. The HNA sequences of the first and the second AAV vector genomes are recombined within cells to form new HNA sequences. The HNA sequences are transcribed and, optionally, translated in the cells of the target tissue. In aspects, the new recombinant HNA sequences comprise a transgene encoding a protein.

[0200] For transgenes that encode proteins, a transgene encoding the full-length protein is split into two portions, the 5′ portion and the 3′ portion. The length of each portion is less than the length of the full transgene. The 5′ portion of the transgene encodes the N-terminal portion of the protein, and the 3′ portion of the transgene encodes the C-terminal portion of the protein. Those skilled in the art will understand that the 5′ portion and/or the 3′ portion of the transgene does not need to have a nucleic acid length that is the multiple of 3 (i.e., the splitting point of the transgene does not have to be in between two codons), because after the recombination of the first and the second AAV vector genomes, these two portions can be rejoined via mRNA splicing to form the full length transgene. As such, the portion of the transgene and the corresponding amino acid sequence it encodes may be a perfect match or have a small mismatch of 1 or 2 nucleotides at the splitting point. Regarding size limits, the 5′ portion of the transgene in a first AAV vector genome may have a size limit of up to about 3.5 kb, about 3.4 kb, about 3.3 kb or about 3.2 kb. The 3′ portion of the transgene, in a second AAV vector genome, may have a size limit of up to about 4.6 kb, about 4.5 kb, about 4.4 kb, or about 4.3 kb.

[0201] A representative example of a protein encoded by a transgene is ABCA4 (ATP-binding cassette, sub-family A, member 4). Mutations of ABCA4 protein can cause Stargardt disease. In humans, wild-type ABCA4 protein is encoded by the ABCA4 gene and has an amino acid sequence according to Uniprot accession number P78363 (SEQ ID NO: 190). An exemplary nucleic acid sequence encoding the ABCA4 protein is SEQ ID NO: 191.

[0202] Suitable ABCA4 proteins may have at least about 70%, at least about 75%, at least about 80%, at least about 85%, at least about 90%, at least about 95% identity, or at least about 99% identity to SEQ ID NO: 190. The ABCA4 protein may be identical to SEQ 1ID NO: 190, or may have up to 1, 2, 3, 4, 5, 6, 7, 8, 9, or 10 amino acids different from SEQ ID NO: 190.

[0203] The nucleic acid encoding the ABCA4 protein is split into a 5′ portion and a 3′ portions that are put into separate AAV vector genomes. The 5′ portion of the ABCA4 transgene may be SEQ ID NO: 192, or a nucleotide sequence having at least about 70%, at least about 75%, at least about 80%, at least about 85%, at least about 90%, at least about 95% identity or at least about 99% identity to SEQ ID NO: 192, and the 3′ portion of the ABCA4 transgene may be SEQ ID NO: 193, or a nucleotide sequence having at least about 70%, at least about 75%, at least about 80%, at least about 85%, at least about 90%, at least about 95% identity or at least about 99% identity to SEQ ID NO: 193.

[0204] Additional examples of transgenes that are suitable for the bipartite gene delivery method include MYO7A and CEP290.

[0205] MYO7A encodes myosin Vila protein and mutations in MYO7A have been implicated in Usher syndrome. In humans, myosin VIIa protein has an amino acid sequence according to SEQ ID NO: 201. An exemplary nucleic acid sequence of MYO7A gene is SEQ ID NO: 202. Suitable myosin VIIa proteins may have at least about 70%, at least about 75%, at least about 80%, at least about 85%, at least about 90%, at least about 95% identity, or at least about 99% identity to SEQ ID NO: 201. The myosin VIIa protein may be identical to SEQ ID NO: 201, or may have up to 1, 2, 3, 4, 5, 6, 7, 8, 9, or 10 amino acids different from SEQ ID NO: 201.

[0206] CEP290 gene encodes a centrosomal protein that is localized to the connecting cilium of the photoreceptors and is involved in both ciliogenesis and ciliary trafficking; mutations in CEP290 have been implicated in Leber congenital amaurosis (LCA). In humans, the CEP290 protein (also known as centrosomal protein of 290 kDa) has an amino acid sequence according to SEQ ID NO: 203. An exemplary nucleic acid sequence of CEP290 gene is SEQ ID NO: 204. Suitable CEP290 proteins may have at least about 70%, at least about 75%, at least about 80%, at least about 85%, at least about 90%, at least about 95% identity, or at least about 99% identity to SEQ ID NO: 203. The CEP290 protein may be identical to SEQ ID NO: 203, or may have up to 1, 2, 3, 4, 5, 6, 7, 8, 9, or 10 amino acids different from SEQ ID NO: 203.

### Methods of Producing AAV Viral Vectors

[0207] A variety of approaches may be used to produce AAV viral vectors. In embodiments, packaging is achieved by using a helper virus or helper plasmid and a cell line. The helper virus or helper plasmid contains elements and sequences that facilitate viral vector production. In another aspect, the helper plasmid is stably incorporated into the genome of a packaging cell line, such that the packaging cell line does not require additional transfection with a helper plasmid.

[0208] In embodiments, the cell is a packaging or helper cell line. In embodiments In aspects, the helper cell line is eukaryotic cell; for example, an HEK 293 cell or 293T cell. In embodiments, the helper cell is a yeast cell or an insect cell.

[0209] A helper plasmid may comprise, for example, at least one viral helper DNA sequence derived from a replication-incompetent viral genome encoding in trans all virion proteins required to package a replication incompetent AAV, and for producing virion proteins capable of packaging the replication-incompetent AAV at high titer, without the production of replication-competent AAV.

[0210] Helper plasmids for packaging AAV are known in the art, see, e.g., U S. Patent Pub. No. 2004/0235174 A1, which is hereby incorporated herein by reference in its entirety. As stated therein, an AAV helper plasmid may contain as helper virus DNA sequences, by way of non-limiting example, the Ad5 genes E2A, 134 and VA, controlled by their respective original promoters or by heterologous promoters. AAV helper plasmids may additionally contain an expression cassette for the expression of a marker protein such as a fluorescent protein to permit the simple detection of transfection of a desired target cell.

[0211] The disclosure provides methods of producing AAV particles comprising transfecting a packaging cell line with any one of the AAV helper plasmids disclosed herein; and any of the AAV vectors disclosed herein. In embodiments, the AAV helper plasmid and AAV vector are co-transfected into the packaging cell line. In embodiments, the cell line is a mammalian cell line, for example, human embryonic kidney (HEK) 293 cell line. The disclosure provides cells comprising any of the AAV vectors, AAV vector genomes, and/or AAV particles disclosed herein.

### Pharmaceutical Compositions

[0212] The disclosure provides pharmaceutical compositions comprising any of the AAV vectors, AAV vector genomes, AAV capsids and/or AAV particles described herein. Typically, the AAV particles are administered for therapy.

[0213] The pharmaceutical composition, as described herein, may be formulated by any methods known or developed in the art of pharmaceutical drug development, which methods include but are not limited to contacting the active ingredients (e.g., viral particles or recombinant vectors) with an excipient or other accessory ingredient, dividing or packaging the product to a dose unit. In embodiments, the pharmaceutical composition is suitable for ocular injection.

[0214] In embodiments, the pharmaceutical composition may further comprise saline, lipidoids, liposomes, lipid nanoparticles, polymers, lipoplexes, core-shell nanoparticles, peptides, proteins, cells transduced with viral vectors (e.g., for transplantation into a subject), nanoparticle mimics or combinations thereof. In embodiments, the pharmaceutical composition is formulated as a nanoparticle. In embodiments, the pharmaceutical composition is formulated as sterile and substantially isotonic solution.

[0215] A pharmaceutical composition in accordance with the present disclosure may be prepared, packaged, and/or sold in bulk, as a single unit dose, and/or as a plurality of single unit doses. The amount of the active ingredient is generally equal to the dosage of the active ingredient which would be administered to a subject and/or a convenient fraction of such a dosage such as, for example, one-half or one-third of such a dosage. The formulations of the invention can include one or more excipients, each in an amount that together increases the stability of the viral vector, increases cell transfection or transduction by the viral vector, increases the expression of vector genome encoded protein, and/or alters the release profile of vector genome encoded proteins. In embodiments, the pharmaceutical composition comprises an excipient. Non limiting examples of excipients include solvents, dispersion media, diluents, or other liquid vehicles, dispersion or suspension aids, surface active agents, isotonic agents, thickening or emulsifying agents, preservatives, or combination thereof.

[0216] In embodiments, the pharmaceutical composition comprises a cryoprotectant. The term “cryoprotectant” refers to an agent capable of reducing or eliminating damage to a substance during freezing. Non-limiting examples of cryoprotectants include sucrose, trehalose, lactose, glycerol, dextrose, raffinose and/or mannitol.

### Therapeutic Methods

[0217] This disclosure provides methods of preventing or treating a genetic disorder, comprising, consisting essentially of, or consisting of administering to a subject a therapeutically effective amount of the pharmaceutical compositions disclosed herein.

[0218] In embodiments, the genetic disorder is an eye disorder, a CNS disorder, a skin disorder, a lung disorder, a muscle disorder, a liver disorder, a digestive disorder, a blood or lymphatic disorder, an inflammatory disorder, or a cancer. In embodiments, the disorder is Stargardt disease.

[0219] In embodiments, the disorder is hypophosphatasia, amyotrophic lateral sclerosis (ALS), spinal muscular atrophy (SMA), recessive dystrophic epidermolysis bullosa (RDEB), lysosomal storage disorder (including Duchenne's Muscular Dystrophy, and Becker muscular dystrophy), juvenile Batten disease, infantile Batten disease, autosomal dominant disorders, muscular dystrophy, Bietti's Crystalline Dystrophy, retinoschisis (e.g., degenerative, hereditary, tractional, exudative), hemophilia A, hemophilia B, multiple sclerosis, diabetes mellitus, Fabry disease, Pompe disease, neuronal ceroid lipofuscinosis 1 (CLN1), CLN3 disease (or juvenile neuronal ceroid lipofuscinosis), Gaucher disease, cancer, arthritis, muscle wasting, heart disease, intimal hyperplasia, Rett syndrome, epilepsy, Huntington's disease, Parkinson's disease, Alzheimer's disease, an autoimmune disease, cystic fibrosis, thalassemia, Hurler's Syndrome (MPS IH), Sly syndrome, Scheie Syndrome, Hurler-Scheie Syndrome, Hunter's Syndrome, Sanfilippo Syndrome A (mucopolysaccharidosis IIIA or MPS IIIA), Sanfilippo Syndrome B (mucopolysaccharidosis IIIB or MPS IIIB), Sanfilippo Syndrome C, Sanfilippo Syndrome D, Morquio Syndrome, Maroteaux-Lamy Syndrome, Krabbe's disease, phenylketonuria, spinal cerebral ataxia, LDL receptor deficiency, hyperammonemia, anemia, arthritis, or adenosine deaminase deficiency.

[0220] In addition to specific transgenes disclosed herein, known active enzymes, structural proteins, or RNA sequences may be used as transgenes to deliver functional activity.

[0221] The disorder may be an ophthalmic disease. The eye is immune privileged tissue and a low dose of viruses may provide a therapeutic benefit. The ophthalmic disease may affect photoreceptor and/or RPE cells. For example, the ophthalmic disease may be retinitis pigmentosa (e.g., autosomal recessive (SPATA7 gene; LRAT gene; TULP1 gene), autosomal dominant (AIPL1 gene), and X-linked (RPGR gene)), an eye disorder related to mutations in the bestrophin-1 (BEST-1) gene (e.g., vitelliform macular dystrophy, age-related macular degeneration, autosomal dominant vitreoretinochoroidopathy, glaucoma, cataracts), Leber congenital amaurosis (LCA; aryl-hydrocarbon interacting protein-like 1 (AIPL1) gene), cone-rod dystrophy (CR-D; ABCA4 gene), Stargardt's (ABCA4 gene), choroideremia (CHM gene), Usher Syndrome (MYO7A gene; CDH23 gene; USH2A gene; CLRN1 gene), retinoschisis (RS1 gene), Bietti's Crystalline Dystrophy (CYP4V2 gene) or Achromatopsia (CNGA3 gene, CNGB3 gene, GNAT2 gene, PDE6C gene, or PDE6H gene).

[0222] Suitable disorders to treat using the methods and compositions of the disclosure include Usher syndrome (USH) and Leber congenital amaurosis (LCA). Usher syndrome is an autosomal recessive disorder characterized by hearing impairment associated with retinitis pigmentosa and in some cases vestibular dysfunction. Usher syndrome type I (USH1) is the most serious type, characterized by severe to profound congenital sensorineural hearing loss, balance deficiency and prepubertal onset of retinitis pigmentosa leading to blindness. Six loci for USH1 (USH1B-USH1G) have been mapped. Mutations in MYO7A gene were found to be responsible for USH1B which is the most common subtype of USH1. MYO7A gene encodes myosin VIIA protein. In the human retina, myosin VIIA displays an active function in the migration of RPE melanosomes, phagocytosis of photoreceptor cell outer segment tips and opsin transport through the cilium of these photoreceptors. The coding sequence of MYO7A has a size of ˜6.6 kb and the encoded myosin VIIA has an amino acid sequence according to Uniprot accession number Q13402-1 (www.uniprot.org/uniprot/Q13402 #Q13402-1). Leber congenital amaurosis (LCA) refers to a group of severe inherited retinal disorders characterized by poor vision within the first year of life, nystagmus, and a non-recordable electroretinogram. Mutations in the CEP290 are one of the most common contributors to LCA. CEP290 gene encodes a centrosomal protein that is localized to the connecting cilium of the photoreceptors and is involved in both ciliogenesis and ciliary trafficking. CEP290 plays a critical role in primary cilium formation and ciliary protein transport. Patients with CEP290-associated LCA retain some cone nuclei in the central cone-rich foveal region. However, these cone photoreceptors have abnormal inner and outer segments resulting in severe vision loss in most patients. The coding sequence of CEP290 gene has a size of ˜7.4 kb and encodes a protein sequence according to Uniprot accession number 015078-1 (www.uniprot.org/uniprot/O15078#O15078-1).

[0223] In embodiments, the cancer is a solid cancer; for example, bladder, breast, cervical, colon, rectal, endometrial, kidney, lip, oral, liver, melanoma, mesothelioma, non-small cell lung, non-melanoma skin, ovarian, pancreatic, prostate, sarcoma, small cell lung tumor, or thyroid.

[0224] The subject may be a mammal; for example, a human. The human may be an infant human; for example, under 3 years old, 2 years old, or under 1 year old.

[0225] The methods of treatment and prevention disclosed herein may be combined with appropriate diagnostic techniques to identify and select patients for the therapy or prevention. For example, the method of treating or preventing a disorder, for example, Stargardt disease, disclosed herein may further comprise steps of performing a genetic test to identify a gene mutation or deletion related to the disorder in the subject. In embodiments, the method of treating or preventing a disorder, for example, Stargardt disease, comprises administering to a subject who has been previously identified as carrying a mutation related to the disorder, or as being at high risk for developing the disorder (for example, based on hereditary factors).

[0226] The disclosure provides methods of increasing the level of a protein in a host cell, comprising contacting the host cell with two AAV viral particles as disclosed herein, wherein the first AAV viral particle comprises a first AAV vector genome, and the second AAV viral particle comprises a second AAV vector genome. Cre-lox mediated recombination of the first AAV vector genome and the second AAV vector genome results in an HNA sequence encoding the protein. In embodiments, the protein is a therapeutic protein. In embodiments, the host cell is in vitro, in vivo, or ex vivo. In embodiments, the host cell is derived from a subject. In embodiments, the subject suffers from a disorder, which results in a reduced level and/or functionality of the protein, as compared to the level and/or functionality of the protein in a normal subject.

[0227] The disclosure provides methods of preventing or treating a disorder of a subject by introducing a transgene into the subject. In embodiments, the method comprises co-administration of effective amounts of two AAV viral particles—the first AAV viral particle comprises a first AAV vector genome comprising a 5′ portion of the transgene, and the second AAV viral particle comprises a second AAV vector genome comprising a 3′ portion of the transgene. For example, the disclosure provides methods of treating Stargardt disease in a subject. In embodiments, the methods comprise co-administration of two AAV viral particles—the first AAV viral particle comprises the first AAV vector genome comprising a 5′ portion of an ABCA4 gene, and the second AAV viral particle comprises the second AAV vector genome comprising a 3′ portion of an ABCA4 gene.

### Dosage and Administration

[0228] Methods of determining the most effective means and dosage of administration are known to those of skill in the art and will vary with the composition used for therapy, the purpose of the therapy and the subject being treated. Single or multiple administrations can be carried out with the dose level and pattern being selected by the treating physician. It is noted that dosage may be impacted by the route of administration. Suitable dosage formulations and methods of administering the agents are known in the art. Non-limiting examples of such suitable dosages may be as low as 10⁹ vector genomes to as much as 10¹⁷ vector genomes per administration.

[0229] In embodiments of the methods described herein, the number of viral particles (eg. AAV) administered to the subject ranges from about 10⁹ to about 10¹⁷. In particular some embodiments, about 10¹⁰ to about 10¹², about 10¹¹ to about 10¹³, about 10¹¹ to about 10¹², about 10¹¹ to about 10¹⁴, about 5×10¹¹ to about 5×10¹², or about 10¹² to about 10¹³ viral particles are administered to the subject. For administration to a human eye, a total dose of about 1×10¹⁰ vg/eye may be used, and a total dose of 5×10⁹ vg/eye may be used for a mouse eye. Non-invasive, in vivo imaging techniques can be used to monitor efficacy/safety in animals, which include but are not limited to scanning laser ophthalmoscopy (SLO), optical coherence tomography (OCT), multi-photon microscopy, fluorescein angiography.

[0230] In embodiments, the viral particle is introduced to the subject intravenously, intrathecally, intracerebrally, intraventricularly, intranasally, intratracheally, intra-aurally, intra-ocularly, or per-ocularly, orally, rectally, transmucosally, inhalationally, transdermally, parenterally, subcutaneously, intradermally, intramuscularly, intrapleurally, topically, intralymphatically, intracisternally; such introduction may also be intra-arterial, intracardiac, subventricular, epidural, intracerebral, intracerebroventricular, sub-retinal, intravitreal, intraarticular, intraperitoneal, intrauterine, or any combination thereof. In embodiments, the viral particles are delivered to a desired target tissue, e.g., to the lung, eye, or CNS, as non-limiting examples. In embodiments, delivery of viral particles is systemic. The intracisternal route of administration involves administration of a drug directly into the cerebrospinal fluid of the brain ventricles. It could be performed by direct injection into the cisterna magna or via a permanently positioned tube.

[0231] For treating an ophthalmic disease (an eye disorder) intraocularly, there are multiple modes of administration known to those skilled in the art, including but not limited to: lacrimal gland (LG) administration, topical eye drop, intra-stromal administration to the cornea, intra-cameral administration (anterior chamber), intravitreal administration, sub-retinal administration, systemic administration, or a combination thereof 80% of genetic eye disorders occur in the photoreceptors. Intravitreal delivery of small volume gene therapies can occur in an out-patient clinic.

[0232] Some AAV particles show tropism for brain and cervical spine and may also cross the blood-brain-barrier (BBB). Some AAV particles show high retinal tropism by subretinal and intravitreal injections. AAV particles of may target multiple eye cell types, such as, for example, cones, rods, and retinal pigment epithelium (RPE). Advantageously, AAV particles may escape neutralizing antibodies against natural serotypes, and thus enable potential redosing. In a further aspect, AAV particles and compositions may be administered in combination with other known treatments for the disorder being treated.

[0233] The AAV particles may be administered via subretinal injection. Routes of subretinal injection comprises: (1) a transcorneal route through the pupil, passing the lens, vitreous, and retina; (2) a transscleral route entering the pars plana or limbus areas, crossing through the vitreous and the opposite side of retina into the subretinal space; and (3) a transscleral route through the choroid and Bruch's membrane without penetrating the retina. Subretinal injection is described in Peng et al. Ophthalmic Res. 2017; 58(4):217-226, which is incorporated herein by reference in its entirety.

[0234] Administration of each of the AAV vectors, AAV viral particles or compositions of this disclosure can be effected in one dose, continuously or intermittently throughout the course of treatment. In embodiments, the AAV vectors, AAV particles or compositions of this disclosure are parenterally administered by injection, infusion or implantation.

[0235] An AAV viral particle comprising the first AAV vector genome and an AAV viral particle comprising the second AAV vector genome may be co-administered or administered sequentially. “Co-administration” refers to administration of a first and a second AAV viral particle together (i.e. both AAV viral particles may be administered in the same composition). “Sequential administration” means that two AAV viral particles are administered separately but within a time interval such that they can act together on the target cells and achieve a physiological effect (i.e., transduce the same cell in a subject and recombine the transgene portions to produce of full-length transgene). For example, administration of one viral particle can precede administration of the other viral particle by up to about 10 minutes, up to about 20 minutes, tip to about 30 minutes, up to about 60 minutes, up to about 2 hours, up to about 3 hours, up to about 6 hours, up to about 12 hours, up to about 24 hours, up to about 2 days, up to about 4 days, up to about 1 week, tip to about 2 weeks, or up to about 4 weeks.

[0236] The AAV viral particle comprising the first AAV vector genome and the AAV viral particle comprising the second AAV vector genome may be administered at a specific ratio or within a specific range of ratios. In embodiments, the ratio of the AAV viral particle comprising the first AAV vector genome to the AAV viral particle comprising the second AAV vector genome is about 0.1:1, about 0.2:1, about 0.3:1, about 0.4:1, about 0.5:1, about 0.6:1, about 0.7:1, about 0.8:1, about 0.9:1, about 1:1, about 1.1:1, about 1.2:1, about 1.3:1, about 1.5:1, about 1.7:1, about 2:1, about 3:1, about 4:1, about 5:1, about 6:1, about 7:1, about 8:1, about 9:1, or about 10:1. In embodiments, the ratio of the AAV viral particle comprising the first AAV vector genome to the AAV viral particle comprising the second AAV vector genome is within the range of 0.1:1 to 101, 0.2:1 to 5:1, 0.3:1 to 3:1, 0.4:1 to 2.5:1, 0.5:1 to 2:1, 0.7:1 to 1.5:1, 0.8:1 to 1.2:1, or 0.9:1 to 1.1:1. In embodiments, the ratio of the AAV viral particle comprising the first AAV vector genome to the AAV viral particle comprising the second AAV vector genome is less than 0.1:1, less than 0.2:1, less than 0.3:1, less than 0.4:1, less than 0.5:1, less than 0.6:1, less than 0.7:1, less than 0.8:1, less than 09:1, or less than 1:1. In embodiments, the ratio of the AAV viral particle comprising the first AAV vector genome to the AAV viral particle comprising the second AAV vector genome is about 1:1. In embodiments, the ratio is calculated by comparing the total number of the AAV viral particle comprising the first AAV vector genome to the total number of the AAV viral particle comprising the second AAV vector genome during the course of administration (e.g., co-administration or sequential administration).

### Kits

[0237] The agents, vectors, or compositions described herein may, in embodiments, be assembled into pharmaceutical or diagnostic or research kits to facilitate their use in therapeutic, diagnostic or research applications. In embodiments, the kits of the present disclosure include any one of the modified AAV capsid proteins, AAV vectors, AAV vector genomes, AAV particles, host cells, isolated tissues, compositions, or pharmaceutical compositions as described herein.

[0238] A kit may further comprise instructions for use. Specifically, such kits may include one or more agents described herein, along with instructions describing the intended application and the proper use of these agents. As an example, In embodiments, the kit may include instructions for mixing one or more components of the kit and/or isolating and mixing a sample and applying to a subject. In embodiments, agents in a kit are in a pharmaceutical formulation and dosage suitable for a particular application and for a method of administration of the agents. Kits for research purposes may contain the components in appropriate concentrations or quantities for running various experiments.

[0239] The kit may be designed to facilitate use of the methods described herein and can take many forms. Each of the compositions of the kit, where applicable, may be provided in liquid form (e.g., in solution), or in solid form, (e.g., a dry powder). In certain cases, some of the compositions may be constitutable or otherwise processable (e.g., to an active form), for example, by the addition of a suitable solvent or other species (for example, water or a cell culture medium), which may or may not be provided with the kit.

[0240] In embodiments, the kit contains any one or more of the components described herein in one or more containers. Thus, in embodiments, the kit may include a container housing agents described herein. The agents may be in the form of a liquid, gel or solid (powder). The agents may be prepared sterilely, packaged in a syringe and shipped refrigerated. Alternatively, they may be housed in a vial or other container for storage. A second container may have other agents prepared sterilely. Alternatively, the kit may include the active agents premixed and shipped in a syringe, vial, tube, or other container. The kit may have one or more or all of the components required to administer the agents to a subject, such as a syringe, topical application devices, or IV needle tubing and bag.

[0241] It is to be understood that while the invention has been described in conjunction with the above embodiments, the foregoing description and examples are intended to illustrate and not limit the scope of the invention. Other aspects, advantages and modifications within the scope of the invention will be apparent to those skilled in the art to which the invention pertains.

### Further Numbered Embodiments

[0242] Further numbered embodiments of the present disclosure are provided as follows:

[0243] Embodiment 1. An AAV vector genome comprising, in 5′ to 3′ orientation:
[0244] (a) a 5′ AAV inverted terminal repeat;
[0245] (b) a promoter;
[0246] (c) a 5′ portion of a transgene;
[0247] (d) a splice donor (SD) site;
[0248] (e) a recombination site;
[0249] (f) a polynucleotide encoding a recombinase;
[0250] (g) a poly-A site; and
[0251] (h) a 3′ AAV inverted terminal repeat,
[0252] wherein expression of the recombinase is operably linked to the promoter.

[0253] Embodiment 2. The AAV vector genome of Embodiment 1, wherein the recombinase is a Cre recombinase.

[0254] Embodiment 3. The AAV vector genome of Embodiment 1 or 2, wherein the recombinase comprises a nuclear localization sequence (NLS).

[0255] Embodiment 4. The AAV vector genome of Embodiment 2 or 3, wherein the recombination site comprises a LoxP71 sequence.

[0256] Embodiment 5. The AAV vector genome of any one of Embodiments 1-4, wherein the AAV vector genome comprises a polynucleotide encoding an internal cleavage polypeptide located between the recombination site and the polynucleotide encoding the recombinase, and wherein the 5′ portion of the transgene, the polynucleotide encoding the internal cleavage polypeptide, and the polynucleotide encoding the recombinase are in the same reading frame.

[0257] Embodiment 6. The AAV vector genome of Embodiments 5, wherein the internal cleavage polypeptide is a self-cleaving peptide selected from the group consisting of T2A, P2A, E2A and F2A.

[0258] Embodiment 7. The AAV vector genome of any one of Embodiments 1-4, wherein the AAV vector genome comprises an internal ribosome entry site (IRES) located between the recombination site and the polynucleotide encoding the recombinase, and wherein the IRES is operably linked to the polynucleotide encoding the recombinase.

[0259] Embodiment 8. The AAV vector genome of any one of Embodiments 1-7, wherein the transgene encodes a polypeptide.

[0260] Embodiment 9. The AAV vector genome of Embodiment 8, wherein the polypeptide is an ABCA4 protein.

[0261] Embodiment 10. The AAV vector genome of any one of Embodiments 1-9, wherein the promoter is a Rous sarcoma virus (RSV) LTR promoter (optionally with the RSV enhancer), a cytomegalovirus (CMV) promoter, an SV40 promoter, a dihydrofolate reductase promoter, a beta-actin promoter, a phosphoglycerol kinase (PGK) promoter, a U6 promoter, an H1 promoter, a CAG promoter, a hybrid chicken beta-actin promoter, an MeCP2 promoter, an EF1 promoter, a ubiquitous chicken β-actin hybrid (CBh) promoter, a U1a promoter, a U1b promoter, an MeCP2 promoter, an MeP418 promoter, an MeP426 promoter, a minimal MeCP2 promoter, a VMD2 promoter, an mRho promoter, a EF1a promoter, a Ubc promoter, a human β-actin promoter, a TRE promoter, an Ac5 promoter, a Polyhedrin promoter, a CaMKIIa promoter, Gal1 promoter, a TEF1 promoter, a GDS promoter, an ADH1 promoter, a Ubi promoter, or an α-1-antitrypsin (hAAT) promoter.

[0262] Embodiment 11. The AAV vector genome of any one of Embodiments 1-9, wherein the promoter is a human rhodopsin kinase (RK) promoter, a human interphotoreceptor binding protein promoter (IRBP), a human red/green opsin promoter (pR2.1), a human blue opsin promoter (1 TB), a mouse opsin promoter (mOP), a mouse short wavelength opsin promoter (mBP), or a human rod cGMP phosphodiesterase β-subunit promoter (βPDE).

[0263] Embodiment 12. An AAV vector genome comprising, in 5′ to 3′ orientation:
[0264] (a) a 5′ AAV inverted terminal repeat;
[0265] (b) a recombination site;
[0266] (c) a splice acceptor (SA) site;
[0267] (d) a 3′ portion of a transgene;
[0268] (e) a poly-A site; and
[0269] (f) a 3′ AAV inverted terminal repeat.

[0270] Embodiment 13. An AAV viral particle, comprising
[0271] (i) an AAV capsid, wherein the AAV capsid comprises an AAV capsid protein; and
[0272] (ii) the AAV vector genome of any one of Embodiments 1-12.

[0273] Embodiment 14. The AAV viral particle of Embodiment 13, wherein the AAV capsid protein is at least 70%, 80%, 90%, 99% or 100% identical to a sequence selected from SEQ ID NOs: 1-3, 67, 71, 196, 205 and 206.

[0274] Embodiment 15. A pharmaceutical composition comprising the AAV vector genome of any one of Embodiments 1-12 or the AAV viral particle of Embodiment 13 or 14.

[0275] Embodiment 16. A pharmaceutical composition comprising
[0276] (i) a first AAV viral particle comprising the AAV vector genome of any one of Embodiments 1-11; and
[0277] (ii) a second AAV viral particle comprising a second AAV vector genome comprising, in 5′ to 3′ orientation:
   [0278] (a) a 5′ AAV inverted terminal repeat;
   [0279] (b) a recombination site;
   [0280] (c) a splice acceptor (SA) site;
   [0281] (d) a 3′ portion of the transgene;
   [0282] (e) a poly-A site; and
   [0283] (f) a 3′ AAV inverted terminal repeat;
[0284] wherein the recombination site in the AAV vector genome of the first AAV viral particle and the recombination site in the second AAV vector genome of the second AAV viral particle prevent backwards recombination.

[0285] Embodiment 17. A method of treating a subject having a disease or disorder caused by a gene defect, comprising:
[0286] (1) administering to the subject a first AAV viral particle comprising:
   [0287] (i) an AAV capsid, wherein the AAV capsid comprises a first AAV capsid protein; and
   [0288] (ii) the AAV vector genome of any one of Embodiments 1-11;
[0289] (2) administering to the subject a second AAV viral particle, comprising:
   [0290] (i) an AAV capsid, wherein the AAV capsid comprises a second AAV capsid protein; and
   [0291] (ii) a second AAV vector genome, wherein the second AAV vector genome comprises, in 5′ to 3′ orientation:
      [0292] (a) a 5′ AAV inverted terminal repeat;
      [0293] (b) a recombination site;
      [0294] (c) a splice acceptor (SA) site;
      [0295] (d) a 3′ portion of the transgene;
      [0296] (e) a poly-A site; and
      [0297] (f) a 3′ AAV inverted terminal repeat.

[0298] Embodiment 18. The method of Embodiment 17, wherein administration of the first AAV viral particle and the second AAV viral particle leads to recombination of the first AAV vector genome and the second AAV vector genome via the recombination site in the AAV vector genome of the first AAV viral particle and the recombination site in the second AAV vector genome of the second AAV viral particle.

[0299] Embodiment 19. The method of Embodiment 17 or 18, wherein administration of the first AAV viral particle and the second AAV viral particle leads to expression of the polypeptide.

[0300] Embodiment 20. The method of any one of Embodiments 17-19, wherein the first AAV viral particle and the second AAV viral particle are co-administered or sequentially administered.

[0301] Embodiment 21. The method of Embodiment 20, wherein the first AAV viral particle and the second AAV viral particle are co-administered.

[0302] Embodiment 22. The method of any one of Embodiments 17-21, wherein the viral particles are administered by subretinal injection.

[0303] Embodiment 23. The method of any one of Embodiments 17-22, wherein the gene defect is an ABCA4 gene defect.

[0304] Embodiment 24. The method of Embodiment 23, wherein the ABCA4 gene defect results in one or more conditions selected from the group consisting of reduced expression of ABCA4 protein, eliminated expression of A3CA4 protein, expression of a mutated ABCA4 protein, and reduced function of ABCA4 protein.

[0305] Embodiment 25. A method of expressing a polypeptide in a cell, comprising:
[0306] (1) transducing the cell with a first AAV viral particle comprising the AAV vector genome of any one of Embodiments 1-11, wherein the transgene encodes the polypeptide; and
[0307] (2) transducing the cell with a second AAV viral particle comprising a second AAV vector genome, wherein the second AAV vector genome comprises, in 5′ to 3′ orientation:
   [0308] (a) a 5′ AAV inverted terminal repeat;
   [0309] (b) a recombination site;
   [0310] (c) a splice acceptor (SA) site;
   [0311] (d) a 3′ portion of the transgene;
   [0312] (e) a poly-A site; and
   [0313] (f) a 3′ AAV inverted terminal repeat.

[0314] Embodiment 26. The method of Embodiment 25, wherein no stable expression of the recombinase is detected in the transduced cell.

[0315] Embodiment 27. The method of Embodiment 25 or 26, wherein the polypeptide is an ABCA4 protein.

[0316] Embodiment 28. A transduced cell, comprising:
[0317] (i) a defective genomic copy of a gene;
[0318] (ii) a first recombinant nucleic acid comprising, in 5′ to 3′ orientation:
   [0319] (a) a 5′ AAV inverted terminal repeat;
   [0320] (b) a promoter;
   [0321] (c) a 5′ portion of a transgene;
   [0322] (d) a splice donor (SD) site;
   [0323] (e) a recombination site;
   [0324] (f) a splice acceptor (SA) site;
   [0325] (g) a 3′ portion of the transgene;
   [0326] (h) a poly-A site; and
   [0327] (i) a 3′ AAV inverted terminal repeat;
[0328] wherein the transgene has a length of 4.6-7.7 kb; and
[0329] (iii) a second recombinant nucleic acid comprising, in 5′ to 3′ orientation: a 5′ AAV inverted terminal repeat, a polynucleotide encoding a recombinase, and a 3′ AAV inverted terminal repeat; wherein the second recombinant nucleic acid lacks a promoter.

[0330] Embodiment 29. The transduced cell of Embodiment 28, wherein no stable expression of the recombinase is detected in the transduced cell.

[0331] Embodiment 30. The transduced cell of Embodiment 28 or 29, wherein the recombinase is a Cre recombinase.

[0332] Embodiment 31 The transduced cell of any one of Embodiments 28-30, wherein the transgene encodes an ABCA4 gene.

[0333] Embodiment 32. The transduced cell of any one of Embodiments 28-31, wherein the cell is an ex vivo cell.

### EXAMPLES

### Example 1

[0334] Construction of Plasmids with Bipartite Design

[0335] Several plasmids were generated to test the expression of full length ABCA4 gene in cells using the bipartite vector system (FIG. 2).

[0336] A “5′ ABCA4−FLAG−Cre” plasmid was constructed, which comprises, from 5′ to 3′: 5′ AAV inverted terminal repeat, a U1a promoter, a 5′ portion of the ABCA4 gene ORF, a splice donor (SD) site, a Lox71 site, the nucleic acid sequence encoding T2A peptide, the nucleic acid sequence encoding Cre recombinase with nuclear localization sequence (NLS), a poly-A site, and 3′ AAV inverted terminal repeat.

[0337] A “5′ ABCA4+FLAG−Cre” plasmid was generated by incorporating a 3×FLAG tag coding sequence into the 5′ portion of the ABCA4 gene in the “5′ ABCA4−FLAG−Cre” plasmid.

[0338] A “5′ ABCA4+FLAG−Cre” plasmid was generated by removing the Cre recombinase coding sequence in the “5′ ABCA4+FLAG+Cre” plasmid.

[0339] A “3′ ABCA4+FLAG” plasmid was constructed, which comprises, from 5′ to 3′: 5′ AAV inverted terminal repeat, a Lox66 site, a splice acceptor (SA) site, 3′ portion of the ABCA4 gene ORF incorporated with a 3×FLAG tag coding sequence, a poly-A site, and a 3′ AAV inverted terminal repeat.

[0340] Two positive control plasmid constructs comprising the full length ABCA4 gene were also generated (FIG. 2). One positive control construct has no intron region, whereas the other positive control comprises an intron region which comprises a splice donor (SD) site, a Lox71 site, and a splice acceptor (SA) site, mimicking the construct generated by the recombination between “5′ ABCA4+FLAG+Cre” and “3′ ABCA4+FLAG” plasmid. Both positive control constructs comprise 3×FLAG tag coding sequences in both the 5′ portion of the ABCA4 gene and the 3′ portion of the ABCA4 gene.

### Example 2

### Expression of Full-Length Protein Using a Bipartite Vector System

[0341] Cell studies were performed using Lec2 cells transfected with the indicated plasmids described in Example 1 and FIG. 2, and the expression of full length ABCA4 protein was examined using Western blotting. Full length ABCA4 protein (with attached FLAG tags) has an estimated molecular weight of ˜261 kD. As shown in FIG. 3A, among the cells that were transfected with the plasmids other than the positive control, expression of full length ABCA4 protein was only observed when both “5′ ABCA4+FLAG+Cre” and “3′ ABCA4−FLAG” plasmids were applied to the cells. On the other hand, there was no expression of full length ABCA4 protein in cells transfected with the dual vector system without Cre recombinase (i.e, the “5′ ABCA4+FLAG−Cre” and “3′ ABCA4+FLAG” pair). Similarly, in a repeat experiment (FIG. 3B), among the cell groups that were transfected with the indicated plasmids other than the positive controls, only two experimental groups showed expression of full length ABCA4. One group was transfected with “5′ ABCA4+FLAG−Cre” and “3′ ABCA4+FLAG” plasmids, and the other group was transfected with “5′ ABCA4−FLAG+Cre” and “3′ ABCA4+FLAG” plasmids. These results indicate that the dual vector system can carry out efficient Cre-lox mediated recombination between the two plasmids which in turn results in expression of the full-length ABCA4 protein.

### Example 3

[0342] No Detectable Expression of Cre Recombinase from the Recombined Nucleic Acid

[0343] The expression level of Cre recombinase in cells containing the plasmids was analyzed (FIG. 4). Lec2 cells were transfected with various plasmids and controls as described in Example 2, and 48 hours after-transfection, cell samples were processed using sample buffer containing 4M urea, and stable expression of Cre recombinase was quantified by Western blotting using 3% milk as blocking agent, rabbit anti-Cre mAb (Cell signaling technology #15036) at 1:10,000 dilution as primary antibody, and goat anti-rabbit-HRP (azure) at 1:10,000 dilution as secondary antibody. Auto-cleaved Cre recombinase has a molecular weight of ˜37 kD. As expected, transfection of either “5′ABCA4−FLAG+Cre” or “5′ABCA4+FLAG+Cre” plasmid resulted in clear expression of Cre recombinase in Lec2 cells. Remarkably, there was no detectable expression by western blot of auto-cleaved Cre recombinase in cells co-transfected with the second plasmid “3′ABCA4+FLAG”, suggesting that the dual vector system allows efficient recombination between the first and second plasmids, which in turn leads to generation of a recombinant nucleic acid containing the Cre recombinase ORF without a promoter, and therefore the Cre recombinase can no longer be expressed.

### Example 4

[0344] Cre-Mediated Recombination of the Bipartite Vector System Achieves Expression of Full-Length ABCA4 mRNA

[0345] We quantified the expression levels of full-length ABCA4 mRNA in cells transfected with various plasmids. As shown in FIG. 5, cells transfected with a dual vector system encoding Cre recombinase (“5′ABCA4+FLAG+Cre” and “3′ABCA4+FLAG”) showed about 55 times higher expression level of full-length ABCA4 mRNA compared to cells transfected with a corresponding dual vector system not encoding Cre recombinase (“5′ABCA4+FLAG−Cre” and “3′ABCA4+FLAG”). These results show that Cre recombinase effectively mediates the recombination between the two starting vectors shortly after they are transfected into the cells and drives expression of the full-length mRNA.

### Example 5

[0346] Delivery of Bipartite Vector System Via Dual AAV Viral Particles Results in Expression of Full-Length ABCA4 mRNA

[0347] We tested whether the bipartite vector system could be delivered by AAV viral particles to express full-length ABCA4 mRNA within the cells. Two types of AAV9 viral particles were prepared using the expression cassettes described in Example 1. One type of AAV9 viral particles comprise an AAV vector genome encoding “5′ABCA4+FLAG+Cre”, and the other type of AAV9 viral particles comprise an AAV vector genome encoding “3′ABCA4+FLAG”. As shown in FIG. 6, ABCA4 negative cells were transduced with the indicated AAV9 viral particles, and the expression level of the full-length ABCA4 mRNA were quantified in each group. Only cells transduced with both types of AAV9 viral particles displayed high expression level of full-length ABCA4 mRNA, and the expression level continued to increase for over 120 hours post-transduction. This result demonstrated that AAV viral particles can effectively deliver the bipartite vector system in the same cell and recombine so that the mRNA payload is properly reconstituted by the system

We claim:

1. An AAV vector genome comprising, in 5′ to 3′ orientation:
(a) a 5′ AAV inverted terminal repeat;
(b) a promoter;
(c) a 5′ portion of a transgene;
(d) a splice donor (SD) site;
(e) a recombination site;
(f) a polynucleotide encoding a recombinase;
(g) a poly-A site; and
(h) a 3′ AAV inverted terminal repeat,
wherein expression of the recombinase is operably linked to the promoter.

2. The AAV vector genome of claim 1, wherein the recombinase is a Cre recombinase.

3. The AAV vector genome of claim 1 or 2, wherein the comprises a nuclear localization sequence (NLS).

4. The AAV vector genome of claim 2 or 3, wherein the recombination site comprises a LoxP71 sequence.

5. The AAV vector genome of any one of claims 1-4, wherein the AAV vector genome comprises a polynucleotide encoding an internal cleavage polypeptide located between the recombination site and the polynucleotide encoding the recombinase, and wherein the 5′ portion of the transgene, the polynucleotide encoding the internal cleavage polypeptide, and the polynucleotide encoding the recombinase are in the same reading frame.

6. The AAV vector genome of claim 5, wherein the internal cleavage polypeptide is a self-cleaving peptide selected from the group consisting of T2A, P2A, E2A and F2A.

7. The AAV vector genome of any one of claims 1-4, wherein the AAV vector genome comprises an internal ribosome entry site (IRES) located between the recombination site and the polynucleotide encoding the recombinase, and wherein the RES is operably linked to the polynucleotide encoding the recombinase.

8. The AAV vector genome of any one of claims 1-7, wherein the transgene encodes a polypeptide.

9. The AAV vector genome of claim 8, wherein the polypeptide is an ABCA4 protein.

10. The AAV vector genome of any one of claims 1-9, wherein the promoter is a Rous sarcoma virus (RSV) LTR promoter (optionally with the RSV enhancer), a cytomegalovirus (CMV) promoter, an SV40 promoter, a dihydrofolate reductase promoter, a beta-actin promoter, a phosphoglycerol kinase (PGK) promoter, a U6 promoter, an H1 promoter, a CAG promoter, a hybrid chicken beta-actin promoter, an MeCP2 promoter, an EF1 promoter, a ubiquitous chicken β-actin hybrid (CBh) promoter, a U1a promoter, a U1b promoter, an MeCP2 promoter, an MeP418 promoter, an MeP426 promoter, a minimal MeCP2 promoter, a VMD2 promoter, an mRho promoter, a EF1a promoter, a Ubc promoter, a human β-actin promoter, a TRE promoter, an Ac5 promoter, a Polyhedrin promoter, a CaMKIIa promoter, Gal1 promoter, a TEF1 promoter, a GDS promoter, an ADH1 promoter, a Ubi promoter, or an α-1-antitrypsin (hAAT) promoter.

11. The AAV vector genome of any one of claims 1-9, wherein the promoter is a human rhodopsin kinase (RK) promoter, a human interphotoreceptor binding protein promoter (IRBP), a human red/green opsin promoter (pR2.1), a human blue opsin promoter (HB), a mouse opsin promoter (mOP), a mouse short wavelength opsin promoter (mBP), or a human rod cGMP phosphodiesterase β-subunit promoter (βPDE).

12. An AAV vector genome comprising, in 5′ to 3′ orientation:
(a) a 5′ AAV inverted terminal repeat;
(b) a recombination site;
(c) a splice acceptor (SA) site;
(d) a 3′ portion of a transgene;
(e) a poly-A site; and
(f) a 3′ AAV inverted terminal repeat.

13. An AAV viral particle, comprising
(i) an AAV capsid, wherein the AAV capsid comprises an AAV capsid protein; and
(ii) the AAV vector genome of any one of claims 1-12.

14. The AAV viral particle of claim 13, wherein the AAV capsid protein is at least 70%, 80%, 90%, 99% or 100% identical to a sequence selected from SEQ ID NOs: 1-3, 67, 71, 196, 205 and 206.

15. A pharmaceutical composition comprising the AAV vector genome of any one of claims 1-12 or the AAV viral particle of claim 13 or 14.

16. A pharmaceutical composition comprising
(i) a first AAV viral particle comprising the AAV vector genome of any one of claims 1-11; and
(ii) a second AAV viral particle comprising a second AAV vector genome comprising, in 5′ to 3′ orientation:
(a) a 5′ AAV inverted terminal repeat;
(b) a recombination site;
(c) a splice acceptor (SA) site;
(d) a 3′ portion of the transgene;
(e) a poly-A site; and
(f) a 3′ AAV inverted terminal repeat;
wherein the recombination site in the AAV vector genome of the first AAV viral particle and the recombination site in the second AAV vector genome of the second AAV viral particle prevent backwards recombination.

17. A method of treating a subject having a disease or disorder caused by a gene defect, comprising:
(1) administering to the subject a first AAV viral particle comprising:
(i) an AAV capsid, wherein the AAV capsid comprises a first AAV capsid protein; and
(ii) the AAV vector genome of any one of claims 1-11;
(2) administering to the subject a second AAV viral particle, comprising:
(i) an AAV capsid, wherein the AAV capsid comprises a second AAV capsid protein; and
(ii) a second AAV vector genome, wherein the second AAV vector genome comprises, in 5′ to 3′ orientation:
(a) a 5′ AAV inverted terminal repeat;
(b) a recombination site;
(c) a splice acceptor (SA) site;
(d) a 3′ portion of the transgene;
(e) a poly-A site; and
(f) a 3′ AAV inverted terminal repeat.

18. The method of claim 17, wherein administration of the first AAV viral particle and the second AAV viral particle leads to recombination of the first AAV vector genome and the second AAV vector genome via the recombination site in the AAV vector genome of the first AAV viral particle and the recombination site in the second AAV vector genome of the second AAV viral particle.

19. The method of claim 17 or 18, wherein administration of the first AAV viral particle and the second AAV viral particle leads to expression of the polypeptide.

20. The method of any one of claims 17-19, wherein the first AAV viral particle and the second AAV viral particle are co-administered or sequentially administered.

21. The method of claim 20, wherein the first AAV viral particle and the second AAV viral particle are co-administered.

22. The method of any one of claims 17-21, wherein the viral particles are administered by subretinal injection.

23. The method of any one of claims 17-22, wherein the gene defect is an ABCA4 gene defect.

24. The method of claim 23, wherein the ABCA4 gene defect results in one or more conditions selected from the group consisting of reduced expression of ABCA4 protein, eliminated expression of ABCA4 protein, expression of a mutated ABCA4 protein, and reduced function of ABCA4 protein.

25. A method of expressing a polypeptide in a cell, comprising:
(1) transducing the cell with a first AAV viral particle comprising the AAV vector genome of any one of claims 1-11, wherein the transgene encodes the polypeptide; and
(2) transducing the cell with a second AAV viral particle comprising a second AAV vector genome, wherein the second AAV vector genome comprises, in 5′ to 3′ orientation:
(a) a 5′ AAV inverted terminal repeat;
(b) a recombination site;
(c) a splice acceptor (SA) site;
(d) a 3′ portion of the transgene;
(e) a poly-A site; and
(f) a 3′ AAV inverted terminal repeat.

26. The method of claim 25, wherein no stable expression of the recombinase is detected in the transduced cell.

27. The method of claim 25 or 26, wherein the polypeptide is an ABCA4 protein.

28. A transduced cell, comprising:
(i) a defective genomic copy of a gene;
(ii) a first recombinant nucleic acid comprising, in 5′ to 3′ orientation:
(a) a 5′ AAV inverted terminal repeat;
(b) a promoter;
(c) a 5′ portion of a transgene;
(d) a splice donor (SD) site;
(e) a recombination site;
(f) a splice acceptor (SA) site;
(g) a 3′ portion of the transgene;
(h) a poly-A site; and
(i) a 3′ AAV inverted terminal repeat;
wherein the transgene has a length of 4.6-7.7 kb; and
(iii) a second recombinant nucleic acid comprising, in 5′ to 3′ orientation: a 5′ AAV inverted terminal repeat, a polynucleotide encoding a recombinase, and a 3′ AAV inverted terminal repeat; wherein the second recombinant nucleic acid lacks a promoter.

29. The transduced cell of claim 28, wherein no stable expression of the recombinase is detected in the transduced cell.

30. The transduced cell of claim 28 or 29, wherein the recombinase is a Cre recombinase.

31. The transduced cell of any one of claims 28-30, wherein the transgene encodes an ABCA4 gene.

32. The transduced cell of any one of claims 28-31, wherein the cell is an ex vivo cell.

The application's sequence listing, which the Patent Office published only in electronic form, follows.

SEQUENCE LISTING (207 sequences)

SEQ ID NO: 1 - protein, 737 aa, Artificial Sequence
  AAV110 VPl
MAADGYLPDWLEDNLSEGIREWWDLKPGAPKPKANQQKQDDGRGLVLPGYKYLGPFNGLDKGEPVNAADAAALEHDKAYDQQLKAGDNPYLRYNHADAEFQERLQEDTSFGGNLGRAVFQAKKRVLEPLGLVEEGAKTAPGKKRPVEPSPQRSPDSSTGIGKKGQQPARKRLNFGQTGDSESVPDPQPLGEPPATPAAVGPTTMASGGGAPMADNNEGADGVGNASGNWHCDSTWLGDRVITTSTRTWALPTYNNHLYKQISSASTGASNDNHYFGYSTPWGYFDFNRFHCHFSPRDWQRLINNNWGFRPKRLNFKLFNIQVKEVTTNDGVTTIANNLTSTVQVFSDSEYQLPYVLGSAHQGCLPPFPADVFMIPQYGYLTLNNGSQAVGRSSFYCLEYFPSQMLRTGNNFTFSYTFEDVPFHSSYAHSQSLDRLMNPLIDQYLYYLNRTQNQSGSAQNKDLLFSRGSPAGMSVQPKNWLPGPCYRQQRVSKTKTDNNNSNFTWTGASKYNLNGRESIINPGTAMASHKDDKDKFFPMSGVMIFGKESAGASNTALDNVMITDEEEIKATNPVATERFGTVAVNLQSSSTDPATGDVHVMGALPGMVWQDRDVYLQGPIWAKIPHTDGHFHPSPLMGGFGLKHPPPQILIKNTPVPANPPAEFSATKFASFITQYSTGQVSVEIEWELQKENSKRWNPEVQYTSNYAKSANVDFTVDNNGLYTEPRPIGTRYLTRPL

SEQ ID NO: 2 - protein, 736 aa, Artificial Sequence
  AAV204 VP1
MAADGYLPDWLEDNLSEGIREWWDLKPGAPKPKANQQKQDDGRGLVLPGYKYLGPFNGLDKGEPVNAADAAALEHDKAYDQQLKAGDNPYLRYNHADAEFQERLQEDTSFGGNLGRAVFQAKKRVLEPLGLVEEGAKTAPGKKRPVEQSPQEPDSSSGIGKTGQQPAKKRLNFGQTGDSESVPDPQPLGEPPATPAAVGPTTMASGGGAPMADNNEGADGVGNASGNWHCDSTWLGDRVITTSTRTWALPTYNNHLYKQISSASTGASNDNHYFGYSTPWGYFDFNRFHCHFSPRDWQRLINNNWGFRPKRLNFKLFNIQVKEVTTNDGVTTIANNLTSTVQVFSDSEYQLPYVLGSAHQGCLPPFPADVFMIPQYGYLTLNNGSQAVGRSSFYCLEYFPSQMLRTGNNFTFSYTFEDVPFHSSYAHSQSLDRLMNPLIDQYLYYLNRTQNQSGSAQNKDLLFSRGSPAGMSVQPKNWLPGPCYRQQRVSKTKTDNNNSNFTWTGASKYNLNGRESIINPGTAMASHKDDKDKFFPMSGVMIFGKESAGASNTALDNVMITDEEEIKATNPVATERFGTVAVNLQNSSTDPATGDVHVMGALPGMVWQDRDVYLQGPIWAKIPHTDGHFHPSPLMGGFGLKHPPPQILIKNTPVPANPPAEFSATKFASFITQYSTGQVSVEIEWELQKENSKRWNPEVQYTSNYAKSANVDFTVDNNGLYTEPRPIGTRYLTRPL

SEQ ID NO: 3 - protein, 735 aa, Artificial Sequence
  AAV214 VPl
MAADGYLPDWLEDNLSEGIREWWALKPGAPKPKANQQKQDDGRGLVLPGYKYLGPFNGLDKGEPVNAADAAALEHDKAYDQQLKAGDNPYLRYNHADAEFQERLQEDTSFGGNLGRAVFQAKKRVLEPFGLVEEGAKTAPGKKRPVEQSPQEPDSSSGIGKTGQQPAKKRLNFGQTGDSESVPDPQPLGEPPATPAAVGPTTMASGGGAPMADNNEGADGVGNASGNWHCDSTWLGDRVITTSTRTWALPTYNNHLYKQISSASTGASNDNHYFGYSTPWGYFDFNRFHCHFSPRDWQRLINNNWGFRPKRLNFKLFNIQVKEVTDNNGVKTIANNLTSTVQVFTDSDYQLPYVLGSAHQGCLPPFPADVFMIPQYGYLTLNDGSQAVGRSSFYCLEYFPSQMLRTGNNFTFSYTFEDVPFHSSYAHSQSLDRLMNPLIDQYLYYLSKTINGSGQNQQTLKFSQGGPNTMANQAKNWLPGPCYRQQRVSTTTGQNNNSNFAWTAGTKYHLNGRNSLMNPGPAMASHKEGEDRFFPLSGSLIFGKQNAARDNADYSDVMLTSEEEIKTTNPVATEEYGIVADNLQQQNTAPQIGTVNSQGALPGMVWQNRDVYLQGPIWAKIPHTDGNFHPSPLMGGFGLKHPPPQILIKNTPVPADPPTTFNQSKLNSFITQYSTGQVSVEIEWELQKENSKRWNPEIQYTSNYYKSTSVDFAVNTEGVYSEPHPIGTRYLTRPL

SEQ ID NO: 4 - DNA, 4287 bp, Artificial Sequence
  CFTRdeltaR
atgcagagaagccccctggagaaggcctctgtggtgagcaagctgttcttcagctggaccagacccatcctgagaaagggctacagacagagactggagctgtctgacatctaccagatcccctctgtggactctgctgacaacctgtctgagaagctggagagagagtgggacagagagctggccagcaagaagaaccccaagctgatcaatgccctgagaagatgcttcttctggagattcatgttctatggcatcttcctgtacctgggggaggtgaccaaggctgtgcagcccctgctgctgggcagaatcattgccagctatgaccctgacaacaaggaggagagaagcattgccatctacctgggcattggcctgtgcctgctgttcattgtgagaaccctgctgctgcaccctgccatctttggcctgcaccacattggcatgcagatgagaattgccatgttcagcctgatctacaagaagaccctgaagctgagcagcagagtgctggacaagatcagcattggccagctggtgagcctgctgagcaacaacctgaacaagtttgatgagggcctggccctggcccactttgtgtggattgcccccctgcaggtggccctgctgatgggcctgatctgggagctgctgcaggcctctgccttctgtggcctgggcttcctgattgtgctggccctgttccaggctggcctgggcagaatgatgatgaagtacagagaccagagagctggcaagatctctgagagactggtgatcacctctgagatgattgagaacatccagtctgtgaaggcctactgctgggaggaggccatggagaagatgattgagaacctgagacagacagagctgaagctgaccagaaaggctgcctatgtgagatacttcaacagctctgccttcttcttctctggcttctttgtggtgttcctgtctgtgctgccctatgccctgatcaagggcatcatcctgagaaagatcttcaccaccatcagcttctgcattgtgctgagaatggctgtgaccagacagttcccctgggctgtgcagacctggtatgacagcctgggggccatcaacaagatccaggacttcctgcagaagcaggagtacaagaccctggagtacaacctgaccaccacagaggtggtgatggagaatgtgacagccttctgggaggagggctttggggagctgtttgagaaggccaagcagaacaacaacaacagaaagaccagcaatggggatgacagcctgttcttcagcaacttcagcctgctgggcacccctgtgctgaaggacatcaacttcaagattgagagaggccagctgctggctgtggctggcagcacaggggctggcaagaccagcctgctgatgatgatcatgggggagctggagccctctgagggcaagatcaagcactctggcagaatcagcttctgcagccagttcagctggatcatgcctggcaccatcaaggagaacatcatctttggggtgagctatgatgagtacagatacagatctgtgatcaaggcctgccagctggaggaggacatcagcaagtttgctgagaaggacaacattgtgctgggggaggggggcatcaccctgtctgggggccagagagccagaatcagcctggccagagctgtgtacaaggatgctgacctgtacctgctggacagcccctttggctacctggatgtgctgacagagaaggagatctttgagagctgtgtgtgcaagctgatggccaacaagaccagaatcctggtgaccagcaagatggagcacctgaagaaggctgacaagatcctgatcctgcatgagggcagcagctacttctatggcaccttctctgagctgcagaacctgcagcctgacttcagcagcaagctgatgggctgtgacagctttgaccagttctctgctgagagaagaaacagcatcctgacagagaccctgcacagattcagcctggagggggatgcccctgtgagctggacagagaccaagaagcagagcttcaagcagacaggggagtttggggagaagagaaagaacagcatcctgaaccccatcaacagcaccctgcaggccagaagaagacagtctgtgctgaacctgatgacccactctgtgaaccagggccagaacatccacagaaagaccacagccagcaccagaaaggtgagcctggccccccaggccaacctgacagagctggacatctacagcagaagactgagccaggagacaggcctggagatctctgaggagatcaatgaggaggacctgaaggagtgcttctttgatgacatggagagcatccctgctgtgaccacctggaacacctacctgagatacatcacagtgcacaagagcctgatctttgtgctgatctggtgcctggtgatcttcctggctgaggtggctgccagcctggtggtgctgtggctgctgggcaacacccccctgcaggacaagggcaacagcacccacagcagaaacaacagctatgctgtgatcatcaccagcaccagcagctactatgtgttctacatctatgtgggggtggctgacaccctgctggccatgggcttcttcagaggcctgcccctggtgcacaccctgatcacagtgagcaagatcctgcaccacaagatgctgcactctgtgctgcaggcccccatgagcaccctgaacaccctgaaggctgggggcatcctgaacagattcagcaaggacattgccatcctggatgacctgctgcccctgaccatctttgacttcatccagctgctgctgattgtgattggggccattgctgtggtggctgtgctgcagccctacatctttgtggccacagtgcctgtgattgtggccttcatcatgctgagagcctacttcctgcagaccagccagcagctgaagcagctggagtctgagggcagaagccccatcttcacccacctggtgaccagcctgaagggcctgtggaccctgagagcctttggcagacagccctactttgagaccctgttccacaaggccctgaacctgcacacagccaactggttcctgtacctgagcaccctgagatggttccagatgagaattgagatgatctttgtgatcttcttcattgctgtgaccttcatcagcatcctgaccacaggggagggggagggcagagtgggcatcatcctgaccctggccatgaacatcatgagcaccctgcagtgggctgtgaacagcagcattgatgtggacagcctgatgagatctgtgagcagagtgttcaagttcattgacatgcccacagagggcaagcccaccaagagcaccaagccctacaagaatggccagctgagcaaggtgatgatcattgagaacagccatgtgaagaaggatgacatctggccctctgggggccagatgacagtgaaggacctgacagccaagtacacagaggggggcaatgccatcctggagaacatcagcttcagcatcagccctggccagagagtgggcctgctgggcagaacaggctctggcaagagcaccctgctgtctgccttcctgagactgctgaacacagagggggagatccagattgatggggtgagctgggacagcatcaccctgcagcagtggagaaaggcctttggggtgatcccccagaaggtgttcatcttctctggcaccttcagaaagaacctggacccctatgagcagtggtctgaccaggagatctggaaggtggctgatgaggtgggcctgagatctgtgattgagcagttccctggcaagctggactttgtgctggtggatgggggctgtgtgctgagccatggccacaagcagctgatgtgcctggccagatctgtgctgagcaaggccaagatcctgctgctggatgagccctctgcccacctggaccctgtgacctaccagatcatcagaagaaccctgaagcaggcctttgctgactgcacagtgatcctgtgtgagcacagaattgaggccatgctggagtgccagcagttcctggtgattgaggagaacaaggtgagacagtatgacagcatccagaagctgctgaatgagagaagcctgttcagacaggccatcagcccctctgacagagtgaagctgttcccccacagaaacagcagcaagtgcaagagcaagccccagattgctgccctgaaggaggagaccgaggaggaggtgcaggacaccagactgtaa

SEQ ID NO: 5 - DNA, 2859 bp, Artificial Sequence
  GAA
atgggagtccgccacccgccctgctcacatcgcctgcttgctgtctgtgccctcgtgtcacttgctaccgccgcgctgcttggtcacattctgctgcacgactttttactagttccgagggaactgtcgggatccagccccgtgctcgaggaaactcaccccgcgcaccaacagggggcgtccaggccgggaccgcgcgacgcccaggcccacccgggccggcctcgggccgtgccaactcagtgcgatgtgccgccgaactcccgcttcgactgtgcgcctgacaaggccataacccaggaacagtgcgaagcacgcggctgctgctatattccggcgaagcagggcttgcagggtgcccaaatgggtcagccttggtgcttctttcccccgtcgtacccctcgtacaagctggagaacctgagcagcagcgaaatggggtacaccgccactctgacccggacgaccccgaccttcttcccgaaagacatcctgaccctgcggctggatgtgatgatggaaactgagaacagactgcacttcactatcaaggaccccgcgaaccgcagatatgaggtgccactggaaacccctcatgtgcattcccgggccccatcccctctgtactcggtggaattctccgaagaacccttcggggtcattgtgcgccggcagcttgatggccgggtcctgctcaacaccaccgtggcaccccttttcttcgctgaccagttcctccagctgagcacctcgctgccgagccagtacatcaccggactggccgagcacctctcccctctgatgctgtccactagctggactaggatcactctgtggaaccgggatctggcccctaccccgggcgcgaacctgtacggatcgcaccccttctacctggccctcgaggacggaggctccgcccacggagtgttcctgctgaactccaacgctatggacgtggtgctccagccgtcccctgcactgtcctggcggagcacagggggtattctggatgtctacatcttcctcggcccggagccaaagtccgtggtgcaacagtatctggatgtcgtgggttacccattcatgccgccatactggggccttggcttccacctgtgccgctggggatacagctccaccgccatcactagacaggtcgtggaaaacatgactagagcccacttccccctcgatgtccagtggaatgacctggactacatggattccagacgcgacttcactttcaacaaggatggattcagagatttccccgctatggtccaagaactgcaccagggtggccggcggtacatgatgattgtggaccccgccatttcaagctccggaccagcgggctcgtaccggccctacgacgaaggtttgcgccgcggcgtgttcatcactaacgaaaccggccagccactgattgggaaggtctggcctggaagcaccgcgttcccggacttcactaacccaacggccttggcgtggtgggaggacatggtggccgaattccacgaccaagtcccattcgacggaatgtggatcgacatgaacgagcccagcaacttcatccgaggctccgaggacggctgccctaacaacgaacttgagaaccctccgtacgtgcctggcgtcgtcggcggaacactgcaggccgctacgatctgtgcctcatcgcatcagttcctgtcaacccactacaacctccataatctgtacggcctcaccgaagccatcgcctcccaccgggccctggtcaaggcccgggggactaggcccttcgtgattagccggagcactttcgccggacacggaagatacgccggacattggaccggcgacgtgtggtcatcgtgggagcagctcgcctcctccgtccccgaaatcctgcagttcaatctcctgggagtccccctcgtgggcgcggacgtgtgcggattcctgggcaatacctctgaggagctgtgcgtgagatggacccagctgggggcgttctaccccttcatgcggaaccacaactcactgctgtccctgcctcaagagccgtactcattctccgagccggcacaacaggccatgcgaaaggctctgaccctccgctatgcgctcttgccccacctctacactctgtttcaccaagcccatgtcgcgggcgaaacagtggccagaccactctttctggaattcccaaaggactcctcaacctggactgtggatcatcagctgctctggggagaggcactgctgatcaccccggtgctccaagccggaaaggcggaagtgaccggatacttccctctcggtacttggtacgacctccaaaccgtgccggtcgaggccctgggcagcttgcctccgccgccggctgccccgcgggagcctgcaatccactccgaggggcaatgggtgaccctccctgcaccactggacaccatcaacgtgcacctccgggccggctacatcatcccgctgcaaggaccgggtctgactaccaccgaatcccggcagcagcccatggcactggccgtggccctgaccaagggaggggaagcacggggagaactcttttgggacgatggagaatccctggaagtgctcgagcggggagcctacactcaagtcatctttcttgcccgcaacaacaccatcgtgaacgaattggtccgcgtgacctccgagggggccggactccagctgcaaaaagtgaccgtgctgggggtggcaaccgccccgcaacaagtgttgtctaacggagtgccggtgtccaacttcacctactcccctgataccaaagttctagatatttgcgtgagcctgctgatgggagaacagttcctggtgtcctggtgctga

SEQ ID NO: 6 - DNA, 2859 bp, Artificial Sequence; identical to SEQ ID NO: 5
  GAA codon-optimized nucleotide sequence 1 (GAA 15)

SEQ ID NO: 7 - DNA, 2859 bp, Artificial Sequence
  GAA Codon-optimized 2 (GAA21)
atgggagttagacaccctccatgtagccacagactgctggccgtgtgtgctctggtgtctctggctacagctgccctgctgggacatatcctgctgcacgacttcttactagttcccagagagctgtccggcagcagccctgtgctggaagaaacacaccctgcacatcagcagggcgcctctagacctggacctagagatgctcaggcccatcctggcagacctagagctgtgcccacacagtgtgacgtgccacctaacagcagattcgactgcgcccctgacaaggccatcacacaagagcagtgtgaagccagaggctgctgctacatccctgccaaacaaggactgcagggcgctcagatgggacagccctggtgcttcttcccaccatcttaccccagctacaagctggaaaacctgagcagcagcgagatgggctacaccgccacactgaccagaaccacacctacattcttcccgaaggacatcctgacactgcggctggacgtgatgatggaaaccgagaaccggctgcacttcaccatcaaggaccccgccaatcggagatacgaggtgccactggaaacccctcacgtgcactctagagccccatctccactgtacagcgtggaattcagcgaggaacccttcggcgtgatcgtgcggagacagctggatggaagagtgctgctgaacaccacagtggcccctctgttcttcgccgaccagtttctgcagctgtccaccagcctgcctagccagtatatcacaggcctggccgagcacctgtctccactgatgctgtctaccagctggacccggatcaccctgtggaacagggatcttgctcctacacctggcgccaacctgtacggctctcaccctttttatctggccctggaagatggcggatctgcccacggtgtctttctgctgaactccaacgccatggacgtggtgctgcagccatctcctgctctgtcttggagaagcacaggcggcatcctggacgtgtacatctttctgggccccgagcctaagagcgtggtgcagcagtatctggacgtcgtgggctaccccttcatgcctccttattggggcctgggcttccacctgtgcagatggggatacagcagcaccgccatcaccagacaggtggtggaaaacatgacccgggctcacttcccactggatgtgcagtggaacgacctggactacatggacagcagacgggacttcaccttcaacaaggacggcttcagagacttccccgccatggtgcaagaactgcaccaaggcggcagacggtacatgatgatcgtggatccagccatcagctctagcggccctgccggctcttacagaccttacgatgagggcctgagaagaggcgtgttcatcaccaacgagacaggccagcctctgatcggcaaagtgtggcctggcagcacagcctttccagacttcacaaaccccaccgctctggcttggtgggaagatatggtggccgagtttcacgatcaggtgcccttcgacggcatgtggatcgacatgaacgagcccagcaacttcatccggggcagcgaggatggctgccccaacaacgaactggaaaatcctccttacgtgcccggcgttgtcggcggaacacttcaggccgctacaatctgtgccagcagccaccagttcctcagcacccactacaacctgcacaatctgtatggcctgaccgaggccattgccagccatagagccctggttaaggccaggggcaccagacctttcgtgatcagcagaagcaccttcgccggccacggcagatatgccggacattggacaggcgacgtgtggtctagttgggagcagctggctagcagcgtgccagagatcctgcagttcaatctgctgggcgtgccactcgtgggagccgatgtttgtggcttcctgggcaacacctccgaggaactgtgtgtgcgttggacacagctgggcgccttctatcccttcatgagaaaccacaacagccttctcagcctgccacaagagccctacagcttctctgagcctgcacagcaggccatgagaaaggccctgactctgagatacgctctgctgccccacctgtacaccctgtttcaccaggctcatgtggccggggagacagtggctagacctctgttcctggaattccccaaggacagctccacctggaccgtggatcatcagctgctgtggggagaagccctgctcatcacacctgttctgcaggccggaaaggccgaagtgaccggctattttcctctcggcacttggtacgacctgcagaccgtgcctgttgaggctctgggatctcttcctccacctcctgccgctcctagagagcctgccattcactctgaaggccagtgggttaccctgcctgctcctctggacaccatcaacgtgcacctgagagctggctacatcatccctctgcaaggccctggcctgacaaccaccgaatctagacagcagcccatggctctggccgtggctttgacaaaaggcggagaggctagaggcgagctgttctgggatgatggcgagagcctggaagtgctggaacggggcgcttatacccaagtgatcttcctggccagaaacaacaccatcgtgaacgaactcgtgcgcgtgaccagtgaaggtgctggactgcaactgcagaaagtgaccgtgctcggagtggccacagcacctcagcaggttctgtctaatggcgtgcccgtgtccaacttcacatacagccccgacaccaaggtcctggacatctgtgtgtcactgctgatgggcgagcagttcctggtgtcctggtgttga

SEQ ID NO: 8 - protein, 952 aa, Homo sapiens
  MISC_FEATURE (1)..(952): Acid Alpha-Glucosidase (GAA)
MGVRHPPCSHRLLAVCALVSLATAALLGHILLHDFLLVPRELSGSSPVLEETHPAHQQGASRPGPRDAQAHPGRPRAVPTQCDVPPNSRFDCAPDKAITQEQCEARGCCYIPAKQGLQGAQMGQPWCFFPPSYPSYKLENLSSSEMGYTATLTRTTPTFFPKDILTLRLDVMMETENRLHFTIKDPANRRYEVPLETPHVHSRAPSPLYSVEFSEEPFGVIVRRQLDGRVLLNTTVAPLFFADQFLQLSTSLPSQYITGLAEHLSPLMLSTSWTRITLWNRDLAPTPGANLYGSHPFYLALEDGGSAHGVFLLNSNAMDVVLQPSPALSWRSTGGILDVYIFLGPEPKSVVQQYLDVVGYPFMPPYWGLGFHLCRWGYSSTAITRQVVENMTRAHFPLDVQWNDLDYMDSRRDFTFNKDGFRDFPAMVQELHQGGRRYMMIVDPAISSSGPAGSYRPYDEGLRRGVFITNETGQPLIGKVWPGSTAFPDFTNPTALAWWEDMVAEFHDQVPFDGMWIDMNEPSNFIRGSEDGCPNNELENPPYVPGVVGGTLQAATICASSHQFLSTHYNLHNLYGLTEAIASHRALVKARGTRPFVISRSTFAGHGRYAGHWTGDVWSSWEQLASSVPEILQFNLLGVPLVGADVCGFLGNTSEELCVRWTQLGAFYPFMRNHNSLLSLPQEPYSFSEPAQQAMRKALTLRYALLPHLYTLFHQAHVAGETVARPLFLEFPKDSSTWTVDHQLLWGEALLITPVLQAGKAEVTGYFPLGTWYDLQTVPVEALGSLPPPPAAPREPAIHSEGQWVTLPAPLDTINVHLRAGYIIPLQGPGLTTTESRQQPMALAVALTKGGEARGELFWDDGESLEVLERGAYTQVIFLARNNTIVNELVRVTSEGAGLQLQKVTVLGVATAPQQVLSNGVPVSNFTYSPDTKVLDICVSLLMGEQFLVSWC

SEQ ID NO: 9 - DNA, 1290 bp, Artificial Sequence
  GLA
atgcagctgaggaacccagaactacatctgggctgcgcgcttgcgcttcgcttcctggccctcgtttcctgggacatccctggggctagagcactggacaatggattggcaaggacgcctaccatgggctggctgcactgggagcgcttcatgtgcaaccttgactgccaggaagagccagattcctgcatcagtgagaagctcttcatggagatggcagagctcatggtctcagaaggctggaaggatgcaggttatgagtacctctgcattgatgactgttggatggctccccaaagagattcagaaggcagacttcaggcagaccctcagcgctttcctcatgggattcgccagctagctaattatgttcacagcaaaggactgaagctagggatttatgcagatgttggaaataaaacctgcgcaggcttccctgggagttttggatactacgacattgatgcccagacctttgctgactggggagtagatctgctaaaatttgatggttgttactgtgacagtttggaaaatttggcagatggttataagcacatgtccttggccctgaataggactggcagaagcattgtgtactcctgtgagtggcctctttatatgtggccctttcaaaagcccaattatacagaaatccgacagtactgcaatcactggcgaaattttgctgacattgatgattcctggaaaagtataaagagtatcttggactggacatcttttaaccaggagagaattgttgatgttgctggaccagggggttggaatgacccagatatgttagtgattggcaactttggcctcagctggaatcagcaagtaactcagatggccctctgggctatcatggctgctcctttattcatgtctaatgacctccgacacatcagccctcaagccaaagctctccttcaggataaggacgtaattgccatcaatcaggaccccttgggcaagcaagggtaccagcttagacagggagacaactttgaagtgtgggaacgacctctctcaggcttagcctgggctgtagctatgataaaccggcaggagattggtggacctcgctcttataccatcgcagttgcttccctgggtaaaggagtggcctgtaatcctgcctgcttcatcacacagctcctccctgtgaaaaggaagctagggttctatgaatggacttcaaggttaagaagtcacataaatcccacaggcactgttttgcttcagctagaaaatacaatgcagatgtcattaaaagacttactttaa

SEQ ID NO: 10 - DNA, 1290 bp, Artificial Sequence
  GLA codon-optimized
atgcagctgagaaatcctgaactgcacctgggctgtgccctggctctgagatttctggctctggtgtcctgggacattcctggcgctagagccctggataatggcctggccagaacacctacaatgggctggctgcactgggagagattcatgtgcaacctggactgccaagaggaacccgacagctgcatcagcgagaagctgttcatggaaatggccgagctgatggtgtccgaaggctggaaggatgccggctacgagtacctgtgcatcgacgattgctggatggcccctcagagagattctgagggcagactgcaggccgatcctcagagatttcctcacggaatccggcagctggccaactacgtgcactctaagggactgaagctgggcatctacgccgacgtgggcaacaagacatgtgccggctttccaggcagcttcggctactacgatatcgacgcccagacctttgccgattggggcgtcgacctgctgaagttcgatggctgctactgcgacagcctggaaaacctggccgacggctacaaacacatgtctctggccctgaaccggaccggcagatctatcgtgtactcttgcgagtggcccctgtacatgtggcccttccagaagcctaactacaccgagatcagacagtactgcaaccactggcggaacttcgccgacatcgatgacagctggaagtccatcaagagcatcctggactggaccagcttcaatcaagagcggatcgtggatgtggctggcccaggcggatggaacgatcctgatatgctggtcatcggcaacttcggcctgagctggaatcagcaagtgacccagatggccctgtgggccattatggccgctcctctgttcatgagcaacgacctgagacacatcagccctcaggccaaggctctgctgcaggataaggacgtgatcgccatcaaccaggatcctctgggcaagcagggctatcagctgagacagggcgacaatttcgaagtgtgggaaagacctctgagcggcctggcttgggccgtcgccatgatcaatagacaagagatcggcggaccccggtcctatacaattgccgtggcttctctcggaaaaggcgtggcctgcaatcctgcctgctttatcacacagctgctccccgtgaagagaaagctgggcttttacgagtggaccagcagactgagatcccacatcaaccccacaggcactgttctgctgcaactggaaaacacaatgcagatgagcctgaaggacctgctgtag

SEQ ID NO: 11 - protein, 429 aa, Artificial Sequence
  GLA
MQLRNPELHLGCALALRFLALVSWDIPGARALDNGLARTPTMGWLHWERFMCNLDCQEEPDSCISEKLFMEMAELMVSEGWKDAGYEYLCIDDCWMAPQRDSEGRLQADPQRFPHGIRQLANYVHSKGLKLGIYADVGNKTCAGFPGSFGYYDIDAQTFADWGVDLLKFDGCYCDSLENLADGYKHMSLALNRTGRSIVYSCEWPLYMWPFQKPNYTEIRQYCNHWRNFADIDDSWKSIKSILDWTSFNQERIVDVAGPGGWNDPDMLVIGNFGLSWNQQVTQMALWAIMAAPLFMSNDLRHISPQAKALLQDKDVIAINQDPLGKQGYQLRQGDNFEVWERPLSGLAWAVAMINRQEIGGPRSYTIAVASLGKGVACNPACFITQLLPVKRKLGFYEWTSRLRSHINPTGTVLLQLENTMQMSLKDLL

SEQ ID NO: 12 - DNA, 1317 bp, Artificial Sequence
  CLN3
atgggaggctgtgcaggctcgcggcggcgcttttcggattccgagggggaggagaccgtcccggagccccggctccctctgttggaccatcagggcgcgcattggaagaacgcggtgggcttctggctgctgggcctttgcaacaacttctcttatgtggtgatgctgagtgccgcccacgacatccttagccacaagaggacatcgggaaaccagagccatgtggacccaggcccaacgccgatcccccacaacagctcatcacgatttgactgcaactctgtctctacggctgctgtgctcctggcggacatcctccccacactcgtcatcaaattgttggctcctcttggccttcacctgctgccctacagcccccgggttctcgtcagtgggatttgtgctgctggaagcttcgtcctggttgccttttctcattctgtggggaccagcctgtgtggtgtggtcttcgctagcatctcatcaggccttggggaggtcaccttcctctccctcactgccttctaccccagggccgtgatctcctggtggtcctcagggactgggggagctgggctgctgggggccctgtcctacctgggcctcacccaggccggcctctcccctcagcagaccctgctgtccatgctgggtatccctgccctgctgctggccagctatttcttgttgctcacatctcctgaggcccaggaccctggaggggaagaagaagcagagagcgcagcccggcagcccctcataagaaccgaggccccggagtcgaagccaggctccagctccagcctctcccttcgggaaaggtggacagtgttcaagggtctgctgtggtacattgttcccttggtcgtagtttactttgccgagtatttcattaaccagggactttttgaactcctctttttctggaacacttccctgagtcacgctcagcaataccgctggtaccagatgctgtaccaggctggcgtctttgcctcccgctcttctctccgctgctgtcgcatccgtttcacctgggccctggccctgctgcagtgcctcaacctggtgttcctgctggcagacgtgtggttcggctttctgccaagcatctacctcgtcttcctgatcattctgtatgaggggctcctgggaggcgcagcctacgtgaacaccttccacaacatcgccctggagaccagtgatgagcaccgggagtttgcaatggcggccacctgcatctctgacacactggggatctccctgtcggggctcctggctttgcctctgcatgacttcctctgccagctctcctga

SEQ ID NO: 13 - DNA, 1317 bp, Artificial Sequence
  CLN3 codon-optimized
atgggaggatgtgctgggtcaagaagacggtttagcgattccgaaggagaggagactgtgcctgagccaagactgcccctgctggatcaccagggagcacactggaagaacgcagtgggattctggctgctgggcctgtgcaacaacttcagctacgtggtcatgctgtccgccgcccacgacatcctgtcccacaagcggacctccggcaatcagtctcacgtggaccccggccctacaccaatcccccacaacagcagcagccggttcgactgtaattccgtgtctaccgcagccgtgctgctggcagacatcctgcccaccctggtcatcaagctgctggcaccactgggcctgcacctgctgccttattctccaagggtgctggtgagcggcatctgcgcagcaggcagcttcgtgctggtggcctttagccactccgtgggcacctctctgtgcggagtggtgtttgcaagcatcagctccggcctgggagaggtgaccttcctgagcctgacagccttttaccctcgcgccgtgatctcctggtggtctagcggcacaggaggagcaggcctgctgggcgccctgtcctatctgggcctgacccaggcaggcctgtccccacagcagacactgctgtctatgctgggcatccctgccctgctgctggcaagctacttcctgctgctgacctccccagaggcacaggaccccggaggagaggaggaggccgagagcgccgcaaggcagccactgatcaggaccgaggcaccagagtccaagcctggctcctctagctccctgtctctgcgggagagatggacagtgttcaagggcctgctgtggtacatcgtgcccctggtggtggtgtacttcgccgagtacttcatcaaccagggcctgtttgagctgctgttcttttggaatacctctctgagccacgcccagcagtaccggtggtatcagatgctgtatcaggcaggcgtgttcgcctcccggtctagcctgagatgctgtcggatcagattcacctgggcactggccctgctgcagtgcctgaacctggtgttcctgctggccgacgtgtggttcggctttctgccctctatctacctggtgtttctgatcatcctgtatgagggcctgctgggaggagcagcctatgtgaacaccttccacaatatcgccctggagacatctgacgagcacagagagtttgctatggccgccacctgtatcagcgatacactgggcatctctctgagcggactgctggctctgcctctgcatgactttctgtgccagctgagttaa

SEQ ID NO: 14 - protein, 438 aa, Homo sapiens
  MISC_FEATURE (1)..(438): Ceroid Lipofuscinosis, Neuronal 3 (CLN3)
MGGCAGSRRRFSDSEGEETVPEPRLPLLDHQGAHWKNAVGFWLLGLCNNFSYVVMLSAAHDILSHKRTSGNQSHVDPGPTPIPHNSSSRFDCNSVSTAAVLLADILPTLVIKLLAPLGLHLLPYSPRVLVSGICAAGSFVLVAFSHSVGTSLCGVVFASISSGLGEVTFLSLTAFYPRAVISWWSSGTGGAGLLGALSYLGLTQAGLSPQQTLLSMLGIPALLLASYFLLLTSPEAQDPGGEEEAESAARQPLIRTEAPESKPGSSSSLSLRERWTVFKGLLWYIVPLVVVYFAEYFINQGLFELLFFWNTSLSHAQQYRWYQMLYQAGVFASRSSLRCCRIRFTWALALLQCLNLVFLLADVWFGFLPSIYLVFLIILYEGLLGGAAYVNTFHNIALETSDEHREFAMAATCISDTLGISLSGLLALPLHDFLCQLS

SEQ ID NO: 15 - DNA, 2211 bp, Artificial Sequence
  AAV204 VP1
atggctgccgatggttatcttccagattggctcgaggacaacctctctgagggcattcgcgagtggtgggacttgaaacctggagccccgaagcccaaagccaaccagcaaaagcaggacgacggccggggtctggtgcttcctggctacaagtacctcggacccttcaacggactcgacaagggggagcccgtcaacgcggcggacgcagcggccctcgagcacgacaaggcctacgaccagcagctcaaagcgggtgacaatccgtacctgcggtataaccacgccgacgccgagtttcaggagcgtctgcaagaagatacgtcttttgggggcaacctcgggcgagcagtcttccaggccaagaagcgggttctcgaacctctcggtctggttgaggaaggcgctaagacggctcctggaaagaaacgtccggtagagcagtcaccacaagagccagactcctcctcgggcatcggcaagacaggccagcagcccgctaaaaagagactcaattttggtcagactggcgactcagagtcagtccccgacccacaacctctcggagaacctccagcaacccccgctgctgtgggacctactacaatggcttcaggcggtggcgcaccaatggcggacaataacgaaggcgccgacggagtgggtaatgcctcaggaaattggcattgcgattccacatggctgggcgacagagtcatcaccaccagcacccgaacatgggccttgcccacctataacaaccacctctacaagcaaatctccagtgcttcaacgggggccagcaacgacaaccactacttcggctacagcaccccctgggggtattttgatttcaacagattccactgccatttctcaccacgtgactggcagcgactcatcaacaacaattggggattccggcccaagagactcaacttcaagctcttcaacatccaagtcaaggaggtcacgacgaatgatggcgtcacgaccatcgctaataaccttaccagcacggttcaagtcttctcggactcggagtaccagttgccgtacgtcctcggctctgcgcaccagggctgcctccctccgttcccggcggacgtgttcatgattccgcagtacggctacctaacgctcaacaatggcagccaggcagtgggacggtcatccttttactgcctggaatatttcccatcgcagatgctgagaacgggcaataactttaccttcagctacaccttcgaggacgtgcctttccacagcagctacgcgcacagccagagcctggaccggctgatgaatcctctcatcgaccagtacctgtattacctgaacagaactcagaatcagtccggaagtgcccaaaacaaggacttgctgtttagccgggggtctccagctggcatgtctgttcagcccaaaaactggctacctggaccctgttaccggcagcagcgcgtttctaaaacaaaaacagacaacaacaacagcaactttacctggacaggtgcttcaaaatataaccttaatgggcgtgaatctataatcaaccctggcactgctatggcctcacacaaagacgacaaagacaagttctttcccatgagcggtgtcatgatttttggaaaggagagcgccggagcttcaaacactgcattggacaatgtcatgatcacagacgaagaggaaatcaaagccactaaccccgtggccaccgaaagatttgggactgtggcagtcaatctccagaacagcagcacagaccctgcgaccggagatgtgcatgttatgggagccttacctggaatggtgtggcaagacagagacgtatacctgcagggtcctatttgggccaaaattcctcacacggatggacactttcacccgtctcctctcatgggcggctttggacttaagcacccgcctcctcagatcctcatcaaaaacacgcctgttcctgcgaatcctccggcagagttttcggctacaaagtttgcttcattcatcacccagtattccacaggacaagtgagcgtggagattgaatgggagctgcagaaagaaaacagcaaacgctggaatcccgaagtgcagtatacatctaactatgcaaaatctgccaacgttgatttcactgtagacaacaatggactttatactgagcctcgccccattggcacccgttacctcacccgtcccctgtaa

SEQ ID NO: 16 - DNA, 1605 bp, Artificial Sequence
  AAV204 VP3
atggcttcaggcggtggcgcaccaatggcggacaataacgaaggcgccgacggagtgggtaatgcctcaggaaattggcattgcgattccacatggctgggcgacagagtcatcaccaccagcacccgaacatgggccttgcccacctataacaaccacctctacaagcaaatctccagtgcttcaacgggggccagcaacgacaaccactacttcggctacagcaccccctgggggtattttgatttcaacagattccactgccatttctcaccacgtgactggcagcgactcatcaacaacaattggggattccggcccaagagactcaacttcaagctcttcaacatccaagtcaaggaggtcacgacgaatgatggcgtcacgaccatcgctaataaccttaccagcacggttcaagtcttctcggactcggagtaccagttgccgtacgtcctcggctctgcgcaccagggctgcctccctccgttcccggcggacgtgttcatgattccgcagtacggctacctaacgctcaacaatggcagccaggcagtgggacggtcatccttttactgcctggaatatttcccatcgcagatgctgagaacgggcaataactttaccttcagctacaccttcgaggacgtgcctttccacagcagctacgcgcacagccagagcctggaccggctgatgaatcctctcatcgaccagtacctgtattacctgaacagaactcagaatcagtccggaagtgcccaaaacaaggacttgctgtttagccgggggtctccagctggcatgtctgttcagcccaaaaactggctacctggaccctgttaccggcagcagcgcgtttctaaaacaaaaacagacaacaacaacagcaactttacctggacaggtgcttcaaaatataaccttaatgggcgtgaatctataatcaaccctggcactgctatggcctcacacaaagacgacaaagacaagttctttcccatgagcggtgtcatgatttttggaaaggagagcgccggagcttcaaacactgcattggacaatgtcatgatcacagacgaagaggaaatcaaagccactaaccccgtggccaccgaaagatttgggactgtggcagtcaatctccagaacagcagcacagaccctgcgaccggagatgtgcatgttatgggagccttacctggaatggtgtggcaagacagagacgtatacctgcagggtcctatttgggccaaaattcctcacacggatggacactttcacccgtctcctctcatgggcggctttggacttaagcacccgcctcctcagatcctcatcaaaaacacgcctgttcctgcgaatcctccggcagagttttcggctacaaagtttgcttcattcatcacccagtattccacaggacaagtgagcgtggagattgaatgggagctgcagaaagaaaacagcaaacgctggaatcccgaagtgcagtatacatctaactatgcaaaatctgccaacgttgatttcactgtagacaacaatggactttatactgagcctcgccccattggcacccgttacctcacccgtcccctgtaa

SEQ ID NO: 17 - protein, 534 aa, Artificial Sequence
  AAV204 VP3
MASGGGAPMADNNEGADGVGNASGNWHCDSTWLGDRVITTSTRTWALPTYNNHLYKQISSASTGASNDNHYFGYSTPWGYFDFNRFHCHFSPRDWQRLINNNWGFRPKRLNFKLFNIQVKEVTTNDGVTTIANNLTSTVQVFSDSEYQLPYVLGSAHQGCLPPFPADVFMIPQYGYLTLNNGSQAVGRSSFYCLEYFPSQMLRTGNNFTFSYTFEDVPFHSSYAHSQSLDRLMNPLIDQYLYYLNRTQNQSGSAQNKDLLFSRGSPAGMSVQPKNWLPGPCYRQQRVSKTKTDNNNSNFTWTGASKYNLNGRESIINPGTAMASHKDDKDKFFPMSGVMIFGKESAGASNTALDNVMITDEEEIKATNPVATERFGTVAVNLQNSSTDPATGDVHVMGALPGMVWQDRDVYLQGPIWAKIPHTDGHFHPSPLMGGFGLKHPPPQILIKNTPVPANPPAEFSATKFASFITQYSTGQVSVEIEWELQKENSKRWNPEVQYTSNYAKSANVDFTVDNNGLYTEPRPIGTRYLTRPL

SEQ ID NO: 18 - DNA, 2208 bp, Artificial Sequence
  ITB102 214 (AAV214) VP1
atggctgccgatggttatcttccagattggctcgaggacaacctctctgagggcattcgcgagtggtgggcgctgaaacctggagccccgaagcccaaagccaaccagcaaaagcaggacgacggccggggtctggtgcttcctggctacaagtacctcggacccttcaacggactcgacaagggggagcccgtcaacgcggcggacgcagcggccctcgagcacgacaaggcctacgaccagcagctcaaagcgggtgacaatccgtacctgcggtataaccacgccgacgccgagtttcaggagcgtctgcaagaagatacgtcttttgggggcaacctcgggcgagcagtcttccaggccaagaagcgggttctcgaaccttttggtctggttgaggaaggtgctaagacggctcctggaaagaaacgtccggtagagcagtcgccacaagagccagactcctcctcgggcatcggcaagacaggccagcagcccgctaaaaagagactcaattttggtcagactggcgactcagagtcagtccccgacccacaacctctcggagaacctccagcaacccccgctgctgtgggacctactacaatggcttcaggcggtggcgcaccaatggcggacaataacgaaggcgccgacggagtgggtaatgcctcaggaaattggcattgcgattccacatggctgggcgacagagtcatcaccaccagcacccgcacctgggccttgcccacctacaataaccacctctacaagcaaatctccagtgcttcaacgggggccagcaacgacaaccactacttcggctacagcaccccctgggggtattttgacttcaacagattccactgccacttttcaccacgtgactggcaaagactcatcaacaacaactggggattccgacccaagagactcaacttcaagctctttaacattcaagtcaaagaggttacggacaacaatggagtcaagaccatcgccaataaccttaccagcacggtccaggtcttcacggactcagactatcagctcccgtacgtcctcggctctgcgcaccagggctgcctccctccgttcccggcggacgtgttcatgattccgcagtacggctacctaacgctcaacgacggcagccaggcagtgggacggtcatccttttactgcctggaatatttcccatcgcagatgctgagaacgggcaacaactttaccttcagctacacctttgaggacgttcctttccacagcagctacgctcacagccagagtctggaccgtctcatgaatcctctgattgaccagtacctgtactacttgtctaagactatcaacggatccggccagaatcagcagactctgaagttcagccaaggtgggcctaatacaatggccaatcaggcaaagaactggctgccaggaccctgttaccgccaacaacgcgtctcaacgacaaccgggcaaaacaacaatagcaactttgcctggactgctgggaccaaataccatctgaatggaagaaattcattgatgaatcctggccccgctatggcatcccacaaagagggcgaggaccgtttttttcccctgtccgggtccctgatttttggcaaacaaaatgctgccagagacaatgcggattacagcgatgtcatgctcaccagcgaggaagaaatcaaaaccactaaccctgtggctacagaggaatacggtatcgtggcagataacttgcagcagcaaaacacggctcctcaaattggaactgtcaacagccagggggccttacccggtatggtctggcagaaccgggacgtgtacctgcagggtcccatctgggccaagattcctcacacggacggcaacttccacccgtctccgctgatgggcggctttggcctgaaacatcctccgcctcagatcctgatcaagaacacgcctgtacctgcggatcctccgaccaccttcaaccagtcaaagctgaactctttcatcacgcaatacagcaccggacaggtcagcgtggaaattgaatgggagctgcagaaggaaaacagcaagcgctggaaccccgagatccagtacacctccaactactacaaatctacaagtgtggactttgctgttaatacagaaggcgtgtactctgaaccccaccccattggcacccgttacctcacccgtcccctgtaa

SEQ ID NO: 19 - DNA, 2211 bp, Artificial Sequence
  AAV214-A VP1
atggctgccgatggttatcttccagattggctcgaggacaacctctctgagggcattcgcgagtggtgggcgctgaaacctggagccccgaagcccaaagccaaccagcaaaagcaggacgacggccggggtctggtgcttcctggctacaagtacctcggacccttcaacggactcgacaagggggagcccgtcaacgcggcggacgcagcggccctcgagcacgacaaggcctacgaccagcagctcaaagcgggtgacaatccgtacctgcggtataaccacgccgacgccgagtttcaggagcgtctgcaagaagatacgtcttttgggggcaacctcgggcgagcagtcttccaggccaagaagcgggttctcgaaccttttggtctggttgaggaaggtgctaagacggctcctggaaagaaacgtccggtagagcagtcgccacaagagccagactcctcctcgggcatcggcaagacaggccagcagcccgctaaaaagagactcaattttggtcagactggcgactcagagtcagtccccgacccacaacctctcggagaacctccagcaacccccgctgctgtgggacctactacaatggcttcaggcggtggcgcaccaatggcggacaataacgaaggcgccgacggagtgggtaatgcctcaggaaattggcattgcgattccacatggctgggcgacagagtcatcaccaccagcacccgcacctgggccttgcccacctacaataaccacctctacaagcaaatctccaacagcacatctggaggatcttcaaatgacaacgcctacttcggctacagcaccccctgggggtattttgacttcaacagattccactgccacttttcaccacgtgactggcaaagactcatcaacaacaactggggattccgacccaagagactcaacttcaagctctttaacattcaagtcaaagaggttacggacaacaatggagtcaagaccatcgccaataaccttaccagcacggtccaggtcttcacggactcagactatcagctcccgtacgtcctcggctctgcgcaccagggctgcctccctccgttcccggcggacgtgttcatgattccgcagtacggctacctaacgctcaacgacggcagccaggcagtgggacggtcatccttttactgcctggaatatttcccatcgcagatgctgagaacgggcaacaactttaccttcagctacacctttgaggacgttcctttccacagcagctacgctcacagccagagtctggaccgtctcatgaatcctctgattgaccagtacctgtactacttgtctaagactatcaacggatccggccagaatcagcagactctgaagttcagccaaggtgggcctaatacaatggccaatcaggcaaagaactggctgccaggaccctgttaccgccaacaacgcgtctcaacgacaaccgggcaaaacaacaatagcaactttgcctggactgctgggaccaaataccatctgaatggaagaaattcattgatgaatcctggccccgctatggcatcccacaaagagggcgaggaccgtttttttcccctgtccgggtccctgatttttggcaaacaaaatgctgccagagacaatgcggattacagcgatgtcatgctcaccagcgaggaagaaatcaaaaccactaaccctgtggctacagaggaatacggtatcgtggcagataacttgcagcagcaaaacacggctcctcaaattggaactgtcaacagccagggggccttacccggtatggtctggcagaaccgggacgtgtacctgcagggtcccatctgggccaagattcctcacacggacggcaacttccacccgtctccgctgatgggcggctttggcctgaaacatcctccgcctcagatcctgatcaagaacacgcctgtacctgcggatcctccgaccaccttcaaccagtcaaagctgaactctttcatcacgcaatacagcaccggacaggtcagcgtggaaattgaatgggagctgcagaaggaaaacagcaagcgctggaaccccgagatccagtacacctccaactactacaaatctacaagtgtggactttgctgttaatacagaaggcgtgtactctgaaccccaccccattggcacccgttacctcacccgtcccctgtaa

SEQ ID NO: 20 - DNA, 2211 bp, Artificial Sequence
  AAV214e VP1
atggctgccgatggttatcttccagattggctcgaggacaacctctctgagggcattcgcgagtggtgggacttgaaacctggagccccgaaacccaaagccaaccagcaaaagcaggacgacggccggggtctggtgcttcctggctacaagtacctcggacccttcaacggactcgacaagggggagcccgtcaacgcggcggatgcagcggccctcgagcacgacaaggcctacgaccagcagctcaaagcgggtgacaatccgtacctgcggtataaccacgccgacgccgagtttcaggagcgtctgcaagaagatacgtcttttgggggcaacctcgggcgagcagtcttccaggccaagaagcgggttctcgaacctctcggtctggttgaggaaggcgctaagacggctcctggaaagaagagaccggtagagccatcaccccagcgttctccagactcctctacgggcatcggcaagaaaggccaacagcccgccagaaaaagactcaattttggtcagactggcgactcagagtcagtccccgacccacaacctctcggagaacctccagcaacccccgctgctgtgggacctactacaatggcttcaggcggtggcgcaccaatggcagacaataacgaaggcgccgacggagtgggtaatgcctcaggaaattggcattgcgattccacatggctgggcgacagagtcatcaccaccagcacccgcacctgggccttgcccacctacaataaccacctctacaagcaaatctccagtgcttcaacgggggccagcaacgacaaccactacttcggctacagcaccccctgggggtattttgacttcaacagattccactgccacttttcaccacgtgactggcaaagactcatcaacaacaactggggattccgacccaagagactcaacttcaagctctttaacattcaagtcaaagaggttacggacaacaatggagtcaagaccatcgccaataaccttaccagcacggtccaggtcttcacggactcagactatcagctcccgtacgtcctcggctctgcgcaccagggctgcctccctccgttcccggcggacgtgttcatgattccgcagtacggctacctaacgctcaacgacggcagccaggcagtgggacggtcatccttttactgcctggaatatttcccatcgcagatgctgagaacgggcaacaactttaccttcagctacacctttgaggacgttcctttccacagcagctacgctcacagccagagtctggaccgtctcatgaatcctctgattgaccagtacctgtactacttgtctaagactatcaacggatccggccagaatcagcagactctgaagttcagccaaggtgggcctaatacaatggccaatcaggcaaagaactggctgccaggaccctgttaccgccaacaacgcgtctcaacgacaaccgggcaaaacaacaatagcaactttgcctggactgctgggaccaaataccatctgaatggaagaaattcattgatgaatcctggccccgctatggcatcccacaaagagggcgaggaccgtttttttcccctgtccgggtccctgatttttggcaaacaaaatgctgccagagacaatgcggattacagcgatgtcatgctcaccagcgaggaagaaatcaaaaccactaaccctgtggctacagaggaatacggtatcgtggcagataacttgcagcagcaaaacacggctcctcaaattggaactgtcaacagccagggggccttacccggtatggtctggcagaaccgggacgtgtacctgcagggtcccatctgggccaagattcctcacacggacggcaacttccacccgtctccgctgatgggcggctttggcctgaaacatcctccgcctcagatcctgatcaagaacacgcctgtacctgcggatcctccgaccaccttcaaccagtcaaagctgaactctttcatcacgcaatacagcaccggacaggtcagcgtggaaattgaatgggagctgcagaaggaaaacagcaagcgctggaaccccgagatccagtacacctccaactactacaaatctacaagtgtggactttgctgttaatacagaaggcgtgtactctgaaccccaccccattggcacccgttacctcacccgtcccctgtaa

SEQ ID NO: 21 - DNA, 2211 bp, Artificial Sequence
  AAV214e8 VP1
atggctgccgatggttatcttccagattggctcgaggacaacctctctgagggcattcgcgagtggtgggcgctgaaacctggagccccgaagcccaaagccaaccagcaaaagcaggacgacggccggggtctggtgcttcctggctacaagtacctcggacccttcaacggactcgacaagggggagcccgtcaacgcggcggacgcagcggccctcgagcacgacaaggcctacgaccagcagctgcaggcgggtgacaatccgtacctgcggtataaccacgccgacgccgagtttcaggagcgtctgcaagaagatacgtcttttgggggcaacctcgggcgagcagtcttccaggccaagaagcgggttctcgaacctctcggtctggttgaggaaggcgctaagacggctcctggaaagaagagaccggtagagccatcaccccagcgttctccagactcctctacgggcatcggcaagaaaggccaacagcccgccagaaaaagactcaattttggtcagactggcgactcagagtcagttccagaccctcaacctctcggagaacctccagcagcgccctctggtgtgggacctaatacaatggcttcaggcggtggcgcaccaatggcggacaataacgaaggcgccgacggagtgggtaatgcctcaggaaattggcattgcgattccacatggctgggcgacagagtcatcaccaccagcacccgcacctgggccttgcccacctacaataaccacctctacaagcaaatctccagtgcttcaacgggggccagcaacgacaaccactacttcggctacagcaccccctgggggtattttgacttcaacagattccactgccacttttcaccacgtgactggcaaagactcatcaacaacaactggggattccgacccaagagactcaacttcaagctctttaacattcaagtcaaagaggttacggacaacaatggagtcaagaccatcgccaataaccttaccagcacggtccaggtcttcacggactcagactatcagctcccgtacgtcctcggctctgcgcaccagggctgcctccctccgttcccggcggacgtgttcatgattccgcagtacggctacctaacgctcaacgacggcagccaggcagtgggacggtcatccttttactgcctggaatatttcccatcgcagatgctgagaacgggcaacaactttaccttcagctacacctttgaggacgttcctttccacagcagctacgctcacagccagagtctggaccgtctcatgaatcctctgattgaccagtacctgtactacttgtctaagactatcaacggatccggccagaatcagcagactctgaagttcagccaaggtgggcctaatacaatggccaatcaggcaaagaactggctgccaggaccctgttaccgccaacaacgcgtctcaacgacaaccgggcaaaacaacaatagcaactttgcctggactgctgggaccaaataccatctgaatggaagaaattcattgatgaatcctggccccgctatggcatcccacaaagagggcgaggaccgtttttttcccctgtccgggtccctgatttttggcaaacaaaatgctgccagagacaatgcggattacagcgatgtcatgctcaccagcgaggaagaaatcaaaaccactaaccctgtggctacagaggaatacggtatcgtggcagataacttgcagcagcaaaacacggctcctcaaattggaactgtcaacagccagggggccttacccggtatggtctggcagaaccgggacgtgtacctgcagggtcccatctgggccaagattcctcacacggacggcaacttccacccgtctccgctgatgggcggctttggcctgaaacatcctccgcctcagatcctgatcaagaacacgcctgtacctgcggatcctccgaccaccttcaaccagtcaaagctgaactctttcatcacgcaatacagcaccggacaggtcagcgtggaaattgaatgggagctgcagaaggaaaacagcaagcgctggaaccccgagatccagtacacctccaactactacaaatctacaagtgtggactttgctgttaatacagaaggcgtgtactctgaaccccaccccattggcacccgttacctcacccgtcccctgtaa

SEQ ID NO: 22 - DNA, 2208 bp, Artificial Sequence
  AAV214e9 VP1
atggctgccgatggttatcttccagattggctcgaggacaaccttagtgaaggaattcgcgagtggtgggctttgaaacctggagcccctcaacccaaggcaaatcaacaacatcaagacaacgctcgaggtcttgtgcttccgggttacaaataccttggacccggcaacggactcgacaagggggagccggtcaacgcagcagacgcggcggccctcgagcacgacaaggcctacgaccagcagctcaaggccggagacaacccgtacctcaagtacaaccacgccgacgccgagttccaggagcggctcaaagaagatacgtcttttgggggcaacctcgggcgagcagtcttccaggccaaaaagaggcttcttgaacctcttggtctggttgaggaagcggctaagacggctcctggaaagaagaggcctgtagagcagtctccccaggaaccggactcctccgcgggtattggcaaatcgggtgcacagcccgctaaaaagagactcaatttcggtcagactggcgacacagagtcagtcccagaccctcaaccaatcggagaacctcccgcagccccctctggtgtgggatctcttacaatggcttcaggcggtggcgcaccaatggcggacaataacgaaggcgccgacggagtgggtaatgcctcaggaaattggcattgcgattccacatggctgggcgacagagtcatcaccaccagcacccgcacctgggccttgcccacctacaataaccacctctacaagcaaatctccagtgcttcaacgggggccagcaacgacaaccactacttcggctacagcaccccctgggggtattttgacttcaacagattccactgccacttttcaccacgtgactggcaaagactcatcaacaacaactggggattccgacccaagagactcaacttcaagctctttaacattcaagtcaaagaggttacggacaacaatggagtcaagaccatcgccaataaccttaccagcacggtccaggtcttcacggactcagactatcagctcccgtacgtcctcggctctgcgcaccagggctgcctccctccgttcccggcggacgtgttcatgattccgcagtacggctacctaacgctcaacgacggcagccaggcagtgggacggtcatccttttactgcctggaatatttcccatcgcagatgctgagaacgggcaacaactttaccttcagctacacctttgaggacgttcctttccacagcagctacgctcacagccagagtctggaccgtctcatgaatcctctgattgaccagtacctgtactacttgtctaagactatcaacggatccggccagaatcagcagactctgaagttcagccaaggtgggcctaatacaatggccaatcaggcaaagaactggctgccaggaccctgttaccgccaacaacgcgtctcaacgacaaccgggcaaaacaacaatagcaactttgcctggactgctgggaccaaataccatctgaatggaagaaattcattgatgaatcctggccccgctatggcatcccacaaagagggcgaggaccgtttttttcccctgtccgggtccctgatttttggcaaacaaaatgctgccagagacaatgcggattacagcgatgtcatgctcaccagcgaggaagaaatcaaaaccactaaccctgtggctacagaggaatacggtatcgtggcagataacttgcagcagcaaaacacggctcctcaaattggaactgtcaacagccagggggccttacccggtatggtctggcagaaccgggacgtgtacctgcagggtcccatctgggccaagattcctcacacggacggcaacttccacccgtctccgctgatgggcggctttggcctgaaacatcctccgcctcagatcctgatcaagaacacgcctgtacctgcggatcctccgaccaccttcaaccagtcaaagctgaactctttcatcacgcaatacagcaccggacaggtcagcgtggaaattgaatgggagctgcagaaggaaaacagcaagcgctggaaccccgagatccagtacacctccaactactacaaatctacaagtgtggactttgctgttaatacagaaggcgtgtactctgaaccccaccccattggcacccgttacctcacccgtcccctgtaa

SEQ ID NO: 23 - DNA, 2211 bp, Artificial Sequence
  AAV214e10 VP1
atggctgccgatggttatcttccagattggctcgaggacaacctctctgagggcattcgcgagtggtgggacttgaaacctggagccccgaaacccaaagccaaccagcaaaagcaggacgacggccggggtctggtgcttcctggctacaagtacctcggacccttcaacggactcgacaagggggagcccgtcaacgcggcggacgcagcggccctcgagcacgacaaggcctacgaccagcagctcaaagcgggtgacaatccgtacctgcggtataaccacgccgacgccgagtttcaggagcgtctgcaagaagatacgtcttttgggggcaacctcgggcgagcagtcttccaggccaagaagcgggttctcgaacctctcggtctggttgaggaaggcgctaagacggctcctggaaagaagagaccggtagagccatcaccccagcgttctccagactcctctacgggcatcggcaagaaaggccagcagcccgcgaaaaagagactcaactttgggcagactggcgactcagagtcagtgcccgaccctcaaccaatcggagaaccccccgcaggcccctctggtctgggatctggtacaatggcttcaggcggtggcgcaccaatggcggacaataacgaaggcgccgacggagtgggtaatgcctcaggaaattggcattgcgattccacatggctgggcgacagagtcatcaccaccagcacccgcacctgggccttgcccacctacaataaccacctctacaagcaaatctccagtgcttcaacgggggccagcaacgacaaccactacttcggctacagcaccccctgggggtattttgacttcaacagattccactgccacttttcaccacgtgactggcaaagactcatcaacaacaactggggattccgacccaagagactcaacttcaagctctttaacattcaagtcaaagaggttacggacaacaatggagtcaagaccatcgccaataaccttaccagcacggtccaggtcttcacggactcagactatcagctcccgtacgtcctcggctctgcgcaccagggctgcctccctccgttcccggcggacgtgttcatgattccgcagtacggctacctaacgctcaacgacggcagccaggcagtgggacggtcatccttttactgcctggaatatttcccatcgcagatgctgagaacgggcaacaactttaccttcagctacacctttgaggacgttcctttccacagcagctacgctcacagccagagtctggaccgtctcatgaatcctctgattgaccagtacctgtactacttgtctaagactatcaacggatccggccagaatcagcagactctgaagttcagccaaggtgggcctaatacaatggccaatcaggcaaagaactggctgccaggaccctgttaccgccaacaacgcgtctcaacgacaaccgggcaaaacaacaatagcaactttgcctggactgctgggaccaaataccatctgaatggaagaaattcattgatgaatcctggccccgctatggcatcccacaaagagggcgaggaccgtttttttcccctgtccgggtccctgatttttggcaaacaaaatgctgccagagacaatgcggattacagcgatgtcatgctcaccagcgaggaagaaatcaaaaccactaaccctgtggctacagaggaatacggtatcgtggcagataacttgcagcagcaaaacacggctcctcaaattggaactgtcaacagccagggggccttacccggtatggtctggcagaaccgggacgtgtacctgcagggtcccatctgggccaagattcctcacacggacggcaacttccacccgtctccgctgatgggcggctttggcctgaaacatcctccgcctcagatcctgatcaagaacacgcctgtacctgcggatcctccgaccaccttcaaccagtcaaagctgaactctttcatcacgcaatacagcaccggacaggtcagcgtggaaattgaatgggagctgcagaaggaaaacagcaagcgctggaaccccgagatccagtacacctccaactactacaaatctacaagtgtggactttgctgttaatacagaaggcgtgtactctgaaccccaccccattggcacccgttacctcacccgtcccctgtaa

SEQ ID NO: 24 - DNA, 1602 bp, Artificial Sequence
  ITB102 214 (AAV214) VP3
atggcttcaggcggtggcgcaccaatggcggacaataacgaaggcgccgacggagtgggtaatgcctcaggaaattggcattgcgattccacatggctgggcgacagagtcatcaccaccagcacccgcacctgggccttgcccacctacaataaccacctctacaagcaaatctccagtgcttcaacgggggccagcaacgacaaccactacttcggctacagcaccccctgggggtattttgacttcaacagattccactgccacttttcaccacgtgactggcaaagactcatcaacaacaactggggattccgacccaagagactcaacttcaagctctttaacattcaagtcaaagaggttacggacaacaatggagtcaagaccatcgccaataaccttaccagcacggtccaggtcttcacggactcagactatcagctcccgtacgtcctcggctctgcgcaccagggctgcctccctccgttcccggcggacgtgttcatgattccgcagtacggctacctaacgctcaacgacggcagccaggcagtgggacggtcatccttttactgcctggaatatttcccatcgcagatgctgagaacgggcaacaactttaccttcagctacacctttgaggacgttcctttccacagcagctacgctcacagccagagtctggaccgtctcatgaatcctctgattgaccagtacctgtactacttgtctaagactatcaacggatccggccagaatcagcagactctgaagttcagccaaggtgggcctaatacaatggccaatcaggcaaagaactggctgccaggaccctgttaccgccaacaacgcgtctcaacgacaaccgggcaaaacaacaatagcaactttgcctggactgctgggaccaaataccatctgaatggaagaaattcattgatgaatcctggccccgctatggcatcccacaaagagggcgaggaccgtttttttcccctgtccgggtccctgatttttggcaaacaaaatgctgccagagacaatgcggattacagcgatgtcatgctcaccagcgaggaagaaatcaaaaccactaaccctgtggctacagaggaatacggtatcgtggcagataacttgcagcagcaaaacacggctcctcaaattggaactgtcaacagccagggggccttacccggtatggtctggcagaaccgggacgtgtacctgcagggtcccatctgggccaagattcctcacacggacggcaacttccacccgtctccgctgatgggcggctttggcctgaaacatcctccgcctcagatcctgatcaagaacacgcctgtacctgcggatcctccgaccaccttcaaccagtcaaagctgaactctttcatcacgcaatacagcaccggacaggtcagcgtggaaattgaatgggagctgcagaaggaaaacagcaagcgctggaaccccgagatccagtacacctccaactactacaaatctacaagtgtggactttgctgttaatacagaaggcgtgtactctgaaccccaccccattggcacccgttacctcacccgtcccctgtaa

SEQ ID NO: 25 - DNA, 1605 bp, Artificial Sequence
  AAV214-A VP3
atggcttcaggcggtggcgcaccaatggcggacaataacgaaggcgccgacggagtgggtaatgcctcaggaaattggcattgcgattccacatggctgggcgacagagtcatcaccaccagcacccgcacctgggccttgcccacctacaataaccacctctacaagcaaatctccaacagcacatctggaggatcttcaaatgacaacgcctacttcggctacagcaccccctgggggtattttgacttcaacagattccactgccacttttcaccacgtgactggcaaagactcatcaacaacaactggggattccgacccaagagactcaacttcaagctctttaacattcaagtcaaagaggttacggacaacaatggagtcaagaccatcgccaataaccttaccagcacggtccaggtcttcacggactcagactatcagctcccgtacgtcctcggctctgcgcaccagggctgcctccctccgttcccggcggacgtgttcatgattccgcagtacggctacctaacgctcaacgacggcagccaggcagtgggacggtcatccttttactgcctggaatatttcccatcgcagatgctgagaacgggcaacaactttaccttcagctacacctttgaggacgttcctttccacagcagctacgctcacagccagagtctggaccgtctcatgaatcctctgattgaccagtacctgtactacttgtctaagactatcaacggatccggccagaatcagcagactctgaagttcagccaaggtgggcctaatacaatggccaatcaggcaaagaactggctgccaggaccctgttaccgccaacaacgcgtctcaacgacaaccgggcaaaacaacaatagcaactttgcctggactgctgggaccaaataccatctgaatggaagaaattcattgatgaatcctggccccgctatggcatcccacaaagagggcgaggaccgtttttttcccctgtccgggtccctgatttttggcaaacaaaatgctgccagagacaatgcggattacagcgatgtcatgctcaccagcgaggaagaaatcaaaaccactaaccctgtggctacagaggaatacggtatcgtggcagataacttgcagcagcaaaacacggctcctcaaattggaactgtcaacagccagggggccttacccggtatggtctggcagaaccgggacgtgtacctgcagggtcccatctgggccaagattcctcacacggacggcaacttccacccgtctccgctgatgggcggctttggcctgaaacatcctccgcctcagatcctgatcaagaacacgcctgtacctgcggatcctccgaccaccttcaaccagtcaaagctgaactctttcatcacgcaatacagcaccggacaggtcagcgtggaaattgaatgggagctgcagaaggaaaacagcaagcgctggaaccccgagatccagtacacctccaactactacaaatctacaagtgtggactttgctgttaatacagaaggcgtgtactctgaaccccaccccattggcacccgttacctcacccgtcccctgtaa

SEQ ID NO: 26 - DNA, 1602 bp, Artificial Sequence
  AAV214e VP3
atggcttcaggcggtggcgcaccaatggcagacaataacgaaggcgccgacggagtgggtaatgcctcaggaaattggcattgcgattccacatggctgggcgacagagtcatcaccaccagcacccgcacctgggccttgcccacctacaataaccacctctacaagcaaatctccagtgcttcaacgggggccagcaacgacaaccactacttcggctacagcaccccctgggggtattttgacttcaacagattccactgccacttttcaccacgtgactggcaaagactcatcaacaacaactggggattccgacccaagagactcaacttcaagctctttaacattcaagtcaaagaggttacggacaacaatggagtcaagaccatcgccaataaccttaccagcacggtccaggtcttcacggactcagactatcagctcccgtacgtcctcggctctgcgcaccagggctgcctccctccgttcccggcggacgtgttcatgattccgcagtacggctacctaacgctcaacgacggcagccaggcagtgggacggtcatccttttactgcctggaatatttcccatcgcagatgctgagaacgggcaacaactttaccttcagctacacctttgaggacgttcctttccacagcagctacgctcacagccagagtctggaccgtctcatgaatcctctgattgaccagtacctgtactacttgtctaagactatcaacggatccggccagaatcagcagactctgaagttcagccaaggtgggcctaatacaatggccaatcaggcaaagaactggctgccaggaccctgttaccgccaacaacgcgtctcaacgacaaccgggcaaaacaacaatagcaactttgcctggactgctgggaccaaataccatctgaatggaagaaattcattgatgaatcctggccccgctatggcatcccacaaagagggcgaggaccgtttttttcccctgtccgggtccctgatttttggcaaacaaaatgctgccagagacaatgcggattacagcgatgtcatgctcaccagcgaggaagaaatcaaaaccactaaccctgtggctacagaggaatacggtatcgtggcagataacttgcagcagcaaaacacggctcctcaaattggaactgtcaacagccagggggccttacccggtatggtctggcagaaccgggacgtgtacctgcagggtcccatctgggccaagattcctcacacggacggcaacttccacccgtctccgctgatgggcggctttggcctgaaacatcctccgcctcagatcctgatcaagaacacgcctgtacctgcggatcctccgaccaccttcaaccagtcaaagctgaactctttcatcacgcaatacagcaccggacaggtcagcgtggaaattgaatgggagctgcagaaggaaaacagcaagcgctggaaccccgagatccagtacacctccaactactacaaatctacaagtgtggactttgctgttaatacagaaggcgtgtactctgaaccccaccccattggcacccgttacctcacccgtcccctgtaa

SEQ ID NO: 27 - DNA, 1602 bp, Artificial Sequence; identical to SEQ ID NO: 24
  AAV214e8 VP3

SEQ ID NO: 28 - DNA, 1602 bp, Artificial Sequence; identical to SEQ ID NO: 24
  AAV214e9 VP3

SEQ ID NO: 29 - DNA, 1602 bp, Artificial Sequence; identical to SEQ ID NO: 24
  AAV214e10 VP3

SEQ ID NO: 30 - protein, 736 aa, Artificial Sequence
  AAV214A VP1
MAADGYLPDWLEDNLSEGIREWWALKPGAPKPKANQQKQDDGRGLVLPGYKYLGPFNGLDKGEPVNAADAAALEHDKAYDQQLKAGDNPYLRYNHADAEFQERLQEDTSFGGNLGRAVFQAKKRVLEPFGLVEEGAKTAPGKKRPVEQSPQEPDSSSGIGKTGQQPAKKRLNFGQTGDSESVPDPQPLGEPPATPAAVGPTTMASGGGAPMADNNEGADGVGNASGNWHCDSTWLGDRVITTSTRTWALPTYNNHLYKQISNSTSGGSSNDNAYFGYSTPWGYFDFNRFHCHFSPRDWQRLINNNWGFRPKRLNFKLFNIQVKEVTDNNGVKTIANNLTSTVQVFTDSDYQLPYVLGSAHQGCLPPFPADVFMIPQYGYLTLNDGSQAVGRSSFYCLEYFPSQMLRTGNNFTFSYTFEDVPFHSSYAHSQSLDRLMNPLIDQYLYYLSKTINGSGQNQQTLKFSQGGPNTMANQAKNWLPGPCYRQQRVSTTTGQNNNSNFAWTAGTKYHLNGRNSLMNPGPAMASHKEGEDRFFPLSGSLIFGKQNAARDNADYSDVMLTSEEEIKTTNPVATEEYGIVADNLQQQNTAPQIGTVNSQGALPGMVWQNRDVYLQGPIWAKIPHTDGNFHPSPLMGGFGLKHPPPQILIKNTPVPADPPTTFNQSKLNSFITQYSTGQVSVEIEWELQKENSKRWNPEIQYTSNYYKSTSVDFAVNTEGVYSEPHPIGTRYLTRPL

SEQ ID NO: 31 - protein, 736 aa, Artificial Sequence
  AAV214e VP1
MAADGYLPDWLEDNLSEGIREWWDLKPGAPKPKANQQKQDDGRGLVLPGYKYLGPFNGLDKGEPVNAADAAALEHDKAYDQQLKAGDNPYLRYNHADAEFQERLQEDTSFGGNLGRAVFQAKKRVLEPLGLVEEGAKTAPGKKRPVEPSPQRSPDSSTGIGKKGQQPARKRLNFGQTGDSESVPDPQPLGEPPATPAAVGPTTMASGGGAPMADNNEGADGVGNASGNWHCDSTWLGDRVITTSTRTWALPTYNNHLYKQISSASTGASNDNHYFGYSTPWGYFDFNRFHCHFSPRDWQRLINNNWGFRPKRLNFKLFNIQVKEVTDNNGVKTIANNLTSTVQVFTDSDYQLPYVLGSAHQGCLPPFPADVFMIPQYGYLTLNDGSQAVGRSSFYCLEYFPSQMLRTGNNFTFSYTFEDVPFHSSYAHSQSLDRLMNPLIDQYLYYLSKTINGSGQNQQTLKFSQGGPNTMANQAKNWLPGPCYRQQRVSTTTGQNNNSNFAWTAGTKYHLNGRNSLMNPGPAMASHKEGEDRFFPLSGSLIFGKQNAARDNADYSDVMLTSEEEIKTTNPVATEEYGIVADNLQQQNTAPQIGTVNSQGALPGMVWQNRDVYLQGPIWAKIPHTDGNFHPSPLMGGFGLKHPPPQILIKNTPVPADPPTTFNQSKLNSFITQYSTGQVSVEIEWELQKENSKRWNPEIQYTSNYYKSTSVDFAVNTEGVYSEPHPIGTRYLTRPL

SEQ ID NO: 32 - protein, 736 aa, Artificial Sequence
  AAV214e8 VP1
MAADGYLPDWLEDNLSEGIREWWALKPGAPKPKANQQKQDDGRGLVLPGYKYLGPFNGLDKGEPVNAADAAALEHDKAYDQQLQAGDNPYLRYNHADAEFQERLQEDTSFGGNLGRAVFQAKKRVLEPLGLVEEGAKTAPGKKRPVEPSPQRSPDSSTGIGKKGQQPARKRLNFGQTGDSESVPDPQPLGEPPAAPSGVGPNTMASGGGAPMADNNEGADGVGNASGNWHCDSTWLGDRVITTSTRTWALPTYNNHLYKQISSASTGASNDNHYFGYSTPWGYFDFNRFHCHFSPRDWQRLINNNWGFRPKRLNFKLFNIQVKEVTDNNGVKTIANNLTSTVQVFTDSDYQLPYVLGSAHQGCLPPFPADVFMIPQYGYLTLNDGSQAVGRSSFYCLEYFPSQMLRTGNNFTFSYTFEDVPFHSSYAHSQSLDRLMNPLIDQYLYYLSKTINGSGQNQQTLKFSQGGPNTMANQAKNWLPGPCYRQQRVSTTTGQNNNSNFAWTAGTKYHLNGRNSLMNPGPAMASHKEGEDRFFPLSGSLIFGKQNAARDNADYSDVMLTSEEEIKTTNPVATEEYGIVADNLQQQNTAPQIGTVNSQGALPGMVWQNRDVYLQGPIWAKIPHTDGNFHPSPLMGGFGLKHPPPQILIKNTPVPADPPTTFNQSKLNSFITQYSTGQVSVEIEWELQKENSKRWNPEIQYTSNYYKSTSVDFAVNTEGVYSEPHPIGTRYLTRPL

SEQ ID NO: 33 - protein, 735 aa, Artificial Sequence
  AAV214e9 VP1
MAADGYLPDWLEDNLSEGIREWWALKPGAPQPKANQQHQDNARGLVLPGYKYLGPGNGLDKGEPVNAADAAALEHDKAYDQQLKAGDNPYLKYNHADAEFQERLKEDTSFGGNLGRAVFQAKKRLLEPLGLVEEAAKTAPGKKRPVEQSPQEPDSSAGIGKSGAQPAKKRLNFGQTGDTESVPDPQPIGEPPAAPSGVGSLTMASGGGAPMADNNEGADGVGNASGNWHCDSTWLGDRVITTSTRTWALPTYNNHLYKQISSASTGASNDNHYFGYSTPWGYFDFNRFHCHFSPRDWQRLINNNWGFRPKRLNFKLFNIQVKEVTDNNGVKTIANNLTSTVQVFTDSDYQLPYVLGSAHQGCLPPFPADVFMIPQYGYLTLNDGSQAVGRSSFYCLEYFPSQMLRTGNNFTFSYTFEDVPFHSSYAHSQSLDRLMNPLIDQYLYYLSKTINGSGQNQQTLKFSQGGPNTMANQAKNWLPGPCYRQQRVSTTTGQNNNSNFAWTAGTKYHLNGRNSLMNPGPAMASHKEGEDRFFPLSGSLIFGKQNAARDNADYSDVMLTSEEEIKTTNPVATEEYGIVADNLQQQNTAPQIGTVNSQGALPGMVWQNRDVYLQGPIWAKIPHTDGNFHPSPLMGGFGLKHPPPQILIKNTPVPADPPTTFNQSKLNSFITQYSTGQVSVEIEWELQKENSKRWNPEIQYTSNYYKSTSVDFAVNTEGVYSEPHPIGTRYLTRPL

SEQ ID NO: 34 - protein, 736 aa, Artificial Sequence
  AAV214e10 VP1
MAADGYLPDWLEDNLSEGIREWWDLKPGAPKPKANQQKQDDGRGLVLPGYKYLGPFNGLDKGEPVNAADAAALEHDKAYDQQLKAGDNPYLRYNHADAEFQERLQEDTSFGGNLGRAVFQAKKRVLEPLGLVEEGAKTAPGKKRPVEPSPQRSPDSSTGIGKKGQQPAKKRLNFGQTGDSESVPDPQPIGEPPAGPSGLGSGTMASGGGAPMADNNEGADGVGNASGNWHCDSTWLGDRVITTSTRTWALPTYNNHLYKQISSASTGASNDNHYFGYSTPWGYFDFNRFHCHFSPRDWQRLINNNWGFRPKRLNFKLFNIQVKEVTDNNGVKTIANNLTSTVQVFTDSDYQLPYVLGSAHQGCLPPFPADVFMIPQYGYLTLNDGSQAVGRSSFYCLEYFPSQMLRTGNNFTFSYTFEDVPFHSSYAHSQSLDRLMNPLIDQYLYYLSKTINGSGQNQQTLKFSQGGPNTMANQAKNWLPGPCYRQQRVSTTTGQNNNSNFAWTAGTKYHLNGRNSLMNPGPAMASHKEGEDRFFPLSGSLIFGKQNAARDNADYSDVMLTSEEEIKTTNPVATEEYGIVADNLQQQNTAPQIGTVNSQGALPGMVWQNRDVYLQGPIWAKIPHTDGNFHPSPLMGGFGLKHPPPQILIKNTPVPADPPTTFNQSKLNSFITQYSTGQVSVEIEWELQKENSKRWNPEIQYTSNYYKSTSVDFAVNTEGVYSEPHPIGTRYLTRPL

SEQ ID NO: 35 - protein, 598 aa, Artificial Sequence
  AAV214 VP2
MAPGKKRPVEQSPQEPDSSSGIGKTGQQPAKKRLNFGQTGDSESVPDPQPLGEPPATPAAVGPTTMASGGGAPMADNNEGADGVGNASGNWHCDSTWLGDRVITTSTRTWALPTYNNHLYKQISSASTGASNDNHYFGYSTPWGYFDFNRFHCHFSPRDWQRLINNNWGFRPKRLNFKLFNIQVKEVTDNNGVKTIANNLTSTVQVFTDSDYQLPYVLGSAHQGCLPPFPADVFMIPQYGYLTLNDGSQAVGRSSFYCLEYFPSQMLRTGNNFTFSYTFEDVPFHSSYAHSQSLDRLMNPLIDQYLYYLSKTINGSGQNQQTLKFSQGGPNTMANQAKNWLPGPCYRQQRVSTTTGQNNNSNFAWTAGTKYHLNGRNSLMNPGPAMASHKEGEDRFFPLSGSLIFGKQNAARDNADYSDVMLTSEEEIKTTNPVATEEYGIVADNLQQQNTAPQIGTVNSQGALPGMVWQNRDVYLQGPIWAKIPHTDGNFHPSPLMGGFGLKHPPPQILIKNTPVPADPPTTFNQSKLNSFITQYSTGQVSVEIEWELQKENSKRWNPEIQYTSNYYKSTSVDFAVNTEGVYSEPHPIGTRYLTRPL

SEQ ID NO: 36 - protein, 599 aa, Artificial Sequence
  AAV214A VP2
MAPGKKRPVEQSPQEPDSSSGIGKTGQQPAKKRLNFGQTGDSESVPDPQPLGEPPATPAAVGPTTMASGGGAPMADNNEGADGVGNASGNWHCDSTWLGDRVITTSTRTWALPTYNNHLYKQISNSTSGGSSNDNAYFGYSTPWGYFDFNRFHCHFSPRDWQRLINNNWGFRPKRLNFKLFNIQVKEVTDNNGVKTIANNLTSTVQVFTDSDYQLPYVLGSAHQGCLPPFPADVFMIPQYGYLTLNDGSQAVGRSSFYCLEYFPSQMLRTGNNFTFSYTFEDVPFHSSYAHSQSLDRLMNPLIDQYLYYLSKTINGSGQNQQTLKFSQGGPNTMANQAKNWLPGPCYRQQRVSTTTGQNNNSNFAWTAGTKYHLNGRNSLMNPGPAMASHKEGEDRFFPLSGSLIFGKQNAARDNADYSDVMLTSEEEIKTTNPVATEEYGIVADNLQQQNTAPQIGTVNSQGALPGMVWQNRDVYLQGPIWAKIPHTDGNFHPSPLMGGFGLKHPPPQILIKNTPVPADPPTTFNQSKLNSFITQYSTGQVSVEIEWELQKENSKRWNPEIQYTSNYYKSTSVDFAVNTEGVYSEPHPIGTRYLTRPL

SEQ ID NO: 37 - protein, 599 aa, Artificial Sequence
  AAV214e VP2
MAPGKKRPVEPSPQRSPDSSTGIGKKGQQPARKRLNFGQTGDSESVPDPQPLGEPPATPAAVGPTTMASGGGAPMADNNEGADGVGNASGNWHCDSTWLGDRVITTSTRTWALPTYNNHLYKQISSASTGASNDNHYFGYSTPWGYFDFNRFHCHFSPRDWQRLINNNWGFRPKRLNFKLFNIQVKEVTDNNGVKTIANNLTSTVQVFTDSDYQLPYVLGSAHQGCLPPFPADVFMIPQYGYLTLNDGSQAVGRSSFYCLEYFPSQMLRTGNNFTFSYTFEDVPFHSSYAHSQSLDRLMNPLIDQYLYYLSKTINGSGQNQQTLKFSQGGPNTMANQAKNWLPGPCYRQQRVSTTTGQNNNSNFAWTAGTKYHLNGRNSLMNPGPAMASHKEGEDRFFPLSGSLIFGKQNAARDNADYSDVMLTSEEEIKTTNPVATEEYGIVADNLQQQNTAPQIGTVNSQGALPGMVWQNRDVYLQGPIWAKIPHTDGNFHPSPLMGGFGLKHPPPQILIKNTPVPADPPTTFNQSKLNSFITQYSTGQVSVEIEWELQKENSKRWNPEIQYTSNYYKSTSVDFAVNTEGVYSEPHPIGTRYLTRPL

SEQ ID NO: 38 - protein, 599 aa, Artificial Sequence
  AAV214e8 VP2
MAPGKKRPVEPSPQRSPDSSTGIGKKGQQPARKRLNFGQTGDSESVPDPQPLGEPPAAPSGVGPNTMASGGGAPMADNNEGADGVGNASGNWHCDSTWLGDRVITTSTRTWALPTYNNHLYKQISSASTGASNDNHYFGYSTPWGYFDFNRFHCHFSPRDWQRLINNNWGFRPKRLNFKLFNIQVKEVTDNNGVKTIANNLTSTVQVFTDSDYQLPYVLGSAHQGCLPPFPADVFMIPQYGYLTLNDGSQAVGRSSFYCLEYFPSQMLRTGNNFTFSYTFEDVPFHSSYAHSQSLDRLMNPLIDQYLYYLSKTINGSGQNQQTLKFSQGGPNTMANQAKNWLPGPCYRQQRVSTTTGQNNNSNFAWTAGTKYHLNGRNSLMNPGPAMASHKEGEDRFFPLSGSLIFGKQNAARDNADYSDVMLTSEEEIKTTNPVATEEYGIVADNLQQQNTAPQIGTVNSQGALPGMVWQNRDVYLQGPIWAKIPHTDGNFHPSPLMGGFGLKHPPPQILIKNTPVPADPPTTFNQSKLNSFITQYSTGQVSVEIEWELQKENSKRWNPEIQYTSNYYKSTSVDFAVNTEGVYSEPHPIGTRYLTRPL

SEQ ID NO: 39 - protein, 598 aa, Artificial Sequence
  AAV214e9 VP2
MAPGKKRPVEQSPQEPDSSAGIGKSGAQPAKKRLNFGQTGDTESVPDPQPIGEPPAAPSGVGSLTMASGGGAPMADNNEGADGVGNASGNWHCDSTWLGDRVITTSTRTWALPTYNNHLYKQISSASTGASNDNHYFGYSTPWGYFDFNRFHCHFSPRDWQRLINNNWGFRPKRLNFKLFNIQVKEVTDNNGVKTIANNLTSTVQVFTDSDYQLPYVLGSAHQGCLPPFPADVFMIPQYGYLTLNDGSQAVGRSSFYCLEYFPSQMLRTGNNFTFSYTFEDVPFHSSYAHSQSLDRLMNPLIDQYLYYLSKTINGSGQNQQTLKFSQGGPNTMANQAKNWLPGPCYRQQRVSTTTGQNNNSNFAWTAGTKYHLNGRNSLMNPGPAMASHKEGEDRFFPLSGSLIFGKQNAARDNADYSDVMLTSEEEIKTTNPVATEEYGIVADNLQQQNTAPQIGTVNSQGALPGMVWQNRDVYLQGPIWAKIPHTDGNFHPSPLMGGFGLKHPPPQILIKNTPVPADPPTTFNQSKLNSFITQYSTGQVSVEIEWELQKENSKRWNPEIQYTSNYYKSTSVDFAVNTEGVYSEPHPIGTRYLTRPL

SEQ ID NO: 40 - protein, 599 aa, Artificial Sequence
  AAV214e10 VP2
MAPGKKRPVEPSPQRSPDSSTGIGKKGQQPAKKRLNFGQTGDSESVPDPQPIGEPPAGPSGLGSGTMASGGGAPMADNNEGADGVGNASGNWHCDSTWLGDRVITTSTRTWALPTYNNHLYKQISSASTGASNDNHYFGYSTPWGYFDFNRFHCHFSPRDWQRLINNNWGFRPKRLNFKLFNIQVKEVTDNNGVKTIANNLTSTVQVFTDSDYQLPYVLGSAHQGCLPPFPADVFMIPQYGYLTLNDGSQAVGRSSFYCLEYFPSQMLRTGNNFTFSYTFEDVPFHSSYAHSQSLDRLMNPLIDQYLYYLSKTINGSGQNQQTLKFSQGGPNTMANQAKNWLPGPCYRQQRVSTTTGQNNNSNFAWTAGTKYHLNGRNSLMNPGPAMASHKEGEDRFFPLSGSLIFGKQNAARDNADYSDVMLTSEEEIKTTNPVATEEYGIVADNLQQQNTAPQIGTVNSQGALPGMVWQNRDVYLQGPIWAKIPHTDGNFHPSPLMGGFGLKHPPPQILIKNTPVPADPPTTFNQSKLNSFITQYSTGQVSVEIEWELQKENSKRWNPEIQYTSNYYKSTSVDFAVNTEGVYSEPHPIGTRYLTRPL

SEQ ID NO: 41 - protein, 533 aa, Artificial Sequence
  AAV214 VP3
MASGGGAPMADNNEGADGVGNASGNWHCDSTWLGDRVITTSTRTWALPTYNNHLYKQISSASTGASNDNHYFGYSTPWGYFDFNRFHCHFSPRDWQRLINNNWGFRPKRLNFKLFNIQVKEVTDNNGVKTIANNLTSTVQVFTDSDYQLPYVLGSAHQGCLPPFPADVFMIPQYGYLTLNDGSQAVGRSSFYCLEYFPSQMLRTGNNFTFSYTFEDVPFHSSYAHSQSLDRLMNPLIDQYLYYLSKTINGSGQNQQTLKFSQGGPNTMANQAKNWLPGPCYRQQRVSTTTGQNNNSNFAWTAGTKYHLNGRNSLMNPGPAMASHKEGEDRFFPLSGSLIFGKQNAARDNADYSDVMLTSEEEIKTTNPVATEEYGIVADNLQQQNTAPQIGTVNSQGALPGMVWQNRDVYLQGPIWAKIPHTDGNFHPSPLMGGFGLKHPPPQILIKNTPVPADPPTTFNQSKLNSFITQYSTGQVSVEIEWELQKENSKRWNPEIQYTSNYYKSTSVDFAVNTEGVYSEPHPIGTRYLTRPL

SEQ ID NO: 42 - protein, 534 aa, Artificial Sequence
  AAV214A VP3
MASGGGAPMADNNEGADGVGNASGNWHCDSTWLGDRVITTSTRTWALPTYNNHLYKQISNSTSGGSSNDNAYFGYSTPWGYFDFNRFHCHFSPRDWQRLINNNWGFRPKRLNFKLFNIQVKEVTDNNGVKTIANNLTSTVQVFTDSDYQLPYVLGSAHQGCLPPFPADVFMIPQYGYLTLNDGSQAVGRSSFYCLEYFPSQMLRTGNNFTFSYTFEDVPFHSSYAHSQSLDRLMNPLIDQYLYYLSKTINGSGQNQQTLKFSQGGPNTMANQAKNWLPGPCYRQQRVSTTTGQNNNSNFAWTAGTKYHLNGRNSLMNPGPAMASHKEGEDRFFPLSGSLIFGKQNAARDNADYSDVMLTSEEEIKTTNPVATEEYGIVADNLQQQNTAPQIGTVNSQGALPGMVWQNRDVYLQGPIWAKIPHTDGNFHPSPLMGGFGLKHPPPQILIKNTPVPADPPTTFNQSKLNSFITQYSTGQVSVEIEWELQKENSKRWNPEIQYTSNYYKSTSVDFAVNTEGVYSEPHPIGTRYLTRPL

SEQ ID NO: 43 - protein, 533 aa, Artificial Sequence; identical to SEQ ID NO: 41
  AAV214E VP3

SEQ ID NO: 44 - protein, 533 aa, Artificial Sequence; identical to SEQ ID NO: 41
  AAV214E8 VP3

SEQ ID NO: 45 - protein, 533 aa, Artificial Sequence; identical to SEQ ID NO: 41
  AAV214E9 VP3

SEQ ID NO: 46 - protein, 533 aa, Artificial Sequence; identical to SEQ ID NO: 41
  AAV214E10 VP3

SEQ ID NO: 47 - DNA, 2211 bp, Artificial Sequence
  ITB102 45 VP1
atggctgccgatggttatcttccagattggctcgaggacaacctctctgagggcattcgcgagtggtgggcgctgaaacctggagccccgaagcccaaagccaaccagcaaaagcaggacgacggccggggtctggtgcttcctggctacaagtacctcggacccttcaacggactcgacaagggggagcccgtcaacgcggcggacgcagcggccctcgagcacgacaaggcctacgaccagcagctcaaagcgggtgacaatccgtacctgcggtataaccacgccgacgccgagtttcaggagcgtctgcaagaagatacgtcttttgggggcaacctcgggcgagcagtcttccaggccaagaagcgggttctcgaaccttttggtctggttgaggaaggtgctaagacggctcctggaaagaaacgtccggtagagcagtcgccacaagagccagactcctcctcgggcatcggcaagacaggccagcagcccgctaaaaagagactcaattttggtcagactggcgactcagagtcagtccccgacccacaacctctcggagaacctccagcaacccccgctgctgtgggacctactacaatggcttcaggcggtggcgcaccaatggcggacaataacgaaggcgccgacggagtgggtaatgcctcaggaaattggcattgcgattccacatggctgggcgacagagtcatcaccaccagcacccgcacctgggccttgcccacctacaataaccacctctacaagcaaatctccagtgcttcaacgggggccagcaacgacaaccactacttcggctacagcaccccctgggggtattttgacttcaacagattccactgccacttttcaccacgtgactggcaaagactcatcaacaacaactggggattccgacccaagagactcaacttcaagctctttaacattcaagtcaaagaggttacggacaacaatggagtcaagaccatcgccaataaccttaccagcacggtccaggtcttcacggactcagactatcagctcccgtacgtgctcgggtcggctcacgagggctgcctcccgccgttcccagcggacgttttcatgattcctcagtacggctacctaacgctcaacaatggcagccaggcagtgggacggtcatccttttactgcctggaatatttcccatcgcagatgctgagaacgggcaacaactttaccttcagctacacctttgaggacgttcctttccacagcagctacgctcacagccagagtctggaccggctgatgaatcctctgattgaccagtacctgtactacttgtctcggactcaaacaacaggaggcacggcaaatacgcagactctgggcttcagccaaggtgggcctaatacaatggccaatcaggcaaagaactggctgccaggaccctgttaccgccaacaacgcgtctcaacgacaaccgggcaaaacaacaatagcaactttgcctggactgctgggaccaaataccatctgaatggaagaaattcattgatgaatcctggccccgctatggcatcccacaaagagggcgaggaccgtttttttcccctgtccgggtccctgatttttggcaaacaaggcactggcagagacaatgtggatgccgacaaagtcatgatcaccaacgaggaagaaatcaaaaccactaaccctgtggctacagaggaatacggtatcgtggcagataacttgcagcagcaaaacacggctcctcaaattggaactgtcaacagccagggggccttacccggtatggtctggcagaaccgggacgtgtacctgcagggtcccatctgggccaagattcctcacacggacggcaacttccacccgtctccgctgatgggcggctttggcctgaaacatcctccgcctcagatcctgatcaagaacacgcctgtacctgcggatcctccgaccaccttcaaccagtcaaagctgaactctttcatcacgcaatacagcaccggacaggtcagcgtggaaattgaatgggagctgcagaaggaaaacagcaagcgctggaaccccgagatccagtacacctccaactactacaaatctacaagtgtggactttgctgttaatacagaaggcgtgtactctgaaccccaccccattggcacccgttacctcacccgtcccctgtaa

SEQ ID NO: 48 - DNA, 1605 bp, Artificial Sequence
  ITB102 45 VP3
atggcttcaggcggtggcgcaccaatggcggacaataacgaaggcgccgacggagtgggtaatgcctcaggaaattggcattgcgattccacatggctgggcgacagagtcatcaccaccagcacccgcacctgggccttgcccacctacaataaccacctctacaagcaaatctccagtgcttcaacgggggccagcaacgacaaccactacttcggctacagcaccccctgggggtattttgacttcaacagattccactgccacttttcaccacgtgactggcaaagactcatcaacaacaactggggattccgacccaagagactcaacttcaagctctttaacattcaagtcaaagaggttacggacaacaatggagtcaagaccatcgccaataaccttaccagcacggtccaggtcttcacggactcagactatcagctcccgtacgtgctcgggtcggctcacgagggctgcctcccgccgttcccagcggacgttttcatgattcctcagtacggctacctaacgctcaacaatggcagccaggcagtgggacggtcatccttttactgcctggaatatttcccatcgcagatgctgagaacgggcaacaactttaccttcagctacacctttgaggacgttcctttccacagcagctacgctcacagccagagtctggaccggctgatgaatcctctgattgaccagtacctgtactacttgtctcggactcaaacaacaggaggcacggcaaatacgcagactctgggcttcagccaaggtgggcctaatacaatggccaatcaggcaaagaactggctgccaggaccctgttaccgccaacaacgcgtctcaacgacaaccgggcaaaacaacaatagcaactttgcctggactgctgggaccaaataccatctgaatggaagaaattcattgatgaatcctggccccgctatggcatcccacaaagagggcgaggaccgtttttttcccctgtccgggtccctgatttttggcaaacaaggcactggcagagacaatgtggatgccgacaaagtcatgatcaccaacgaggaagaaatcaaaaccactaaccctgtggctacagaggaatacggtatcgtggcagataacttgcagcagcaaaacacggctcctcaaattggaactgtcaacagccagggggccttacccggtatggtctggcagaaccgggacgtgtacctgcagggtcccatctgggccaagattcctcacacggacggcaacttccacccgtctccgctgatgggcggctttggcctgaaacatcctccgcctcagatcctgatcaagaacacgcctgtacctgcggatcctccgaccaccttcaaccagtcaaagctgaactctttcatcacgcaatacagcaccggacaggtcagcgtggaaattgaatgggagctgcagaaggaaaacagcaagcgctggaaccccgagatccagtacacctccaactactacaaatctacaagtgtggactttgctgttaatacagaaggcgtgtactctgaaccccaccccattggcacccgttacctcacccgtcccctgtaa

SEQ ID NO: 49 - protein, 736 aa, Artificial Sequence
  ITB102 45 VP1
MAADGYLPDWLEDNLSEGIREWWALKPGAPKPKANQQKQDDGRGLVLPGYKYLGPFNGLDKGEPVNAADAAALEHDKAYDQQLKAGDNPYLRYNHADAEFQERLQEDTSFGGNLGRAVFQAKKRVLEPFGLVEEGAKTAPGKKRPVEQSPQEPDSSSGIGKTGQQPAKKRLNFGQTGDSESVPDPQPLGEPPATPAAVGPTTMASGGGAPMADNNEGADGVGNASGNWHCDSTWLGDRVITTSTRTWALPTYNNHLYKQISSASTGASNDNHYFGYSTPWGYFDFNRFHCHFSPRDWQRLINNNWGFRPKRLNFKLFNIQVKEVTDNNGVKTIANNLTSTVQVFTDSDYQLPYVLGSAHEGCLPPFPADVFMIPQYGYLTLNNGSQAVGRSSFYCLEYFPSQMLRTGNNFTFSYTFEDVPFHSSYAHSQSLDRLMNPLIDQYLYYLSRTQTTGGTANTQTLGFSQGGPNTMANQAKNWLPGPCYRQQRVSTTTGQNNNSNFAWTAGTKYHLNGRNSLMNPGPAMASHKEGEDRFFPLSGSLIFGKQGTGRDNVDADKVMITNEEEIKTTNPVATEEYGIVADNLQQQNTAPQIGTVNSQGALPGMVWQNRDVYLQGPIWAKIPHTDGNFHPSPLMGGFGLKHPPPQILIKNTPVPADPPTTFNQSKLNSFITQYSTGQVSVEIEWELQKENSKRWNPEIQYTSNYYKSTSVDFAVNTEGVYSEPHPIGTRYLTRPL

SEQ ID NO: 50 - protein, 599 aa, Artificial Sequence
  ITB102 45 VP2
MAPGKKRPVEQSPQEPDSSSGIGKTGQQPAKKRLNFGQTGDSESVPDPQPLGEPPATPAAVGPTTMASGGGAPMADNNEGADGVGNASGNWHCDSTWLGDRVITTSTRTWALPTYNNHLYKQISSASTGASNDNHYFGYSTPWGYFDFNRFHCHFSPRDWQRLINNNWGFRPKRLNFKLFNIQVKEVTDNNGVKTIANNLTSTVQVFTDSDYQLPYVLGSAHEGCLPPFPADVFMIPQYGYLTLNNGSQAVGRSSFYCLEYFPSQMLRTGNNFTFSYTFEDVPFHSSYAHSQSLDRLMNPLIDQYLYYLSRTQTTGGTANTQTLGFSQGGPNTMANQAKNWLPGPCYRQQRVSTTTGQNNNSNFAWTAGTKYHLNGRNSLMNPGPAMASHKEGEDRFFPLSGSLIFGKQGTGRDNVDADKVMITNEEEIKTTNPVATEEYGIVADNLQQQNTAPQIGTVNSQGALPGMVWQNRDVYLQGPIWAKIPHTDGNFHPSPLMGGFGLKHPPPQILIKNTPVPADPPTTFNQSKLNSFITQYSTGQVSVEIEWELQKENSKRWNPEIQYTSNYYKSTSVDFAVNTEGVYSEPHPIGTRYLTRPL

SEQ ID NO: 51 - protein, 534 aa, Artificial Sequence
  ITB102 45 VP3
MASGGGAPMADNNEGADGVGNASGNWHCDSTWLGDRVITTSTRTWALPTYNNHLYKQISSASTGASNDNHYFGYSTPWGYFDFNRFHCHFSPRDWQRLINNNWGFRPKRLNFKLFNIQVKEVTDNNGVKTIANNLTSTVQVFTDSDYQLPYVLGSAHEGCLPPFPADVFMIPQYGYLTLNNGSQAVGRSSFYCLEYFPSQMLRTGNNFTFSYTFEDVPFHSSYAHSQSLDRLMNPLIDQYLYYLSRTQTTGGTANTQTLGFSQGGPNTMANQAKNWLPGPCYRQQRVSTTTGQNNNSNFAWTAGTKYHLNGRNSLMNPGPAMASHKEGEDRFFPLSGSLIFGKQGTGRDNVDADKVMITNEEEIKTTNPVATEEYGIVADNLQQQNTAPQIGTVNSQGALPGMVWQNRDVYLQGPIWAKIPHTDGNFHPSPLMGGFGLKHPPPQILIKNTPVPADPPTTFNQSKLNSFITQYSTGQVSVEIEWELQKENSKRWNPEIQYTSNYYKSTSVDFAVNTEGVYSEPHPIGTRYLTRPL

SEQ ID NO: 52 - protein, 7 aa, Artificial Sequence
  VR-I
SASTGAS

SEQ ID NO: 53 - protein, 8 aa, Artificial Sequence
  VR-I
NSTSGGSS

SEQ ID NO: 54 - protein, 6 aa, Artificial Sequence
  VR-II
DNNGVK

SEQ ID NO: 55 - protein, 4 aa, Artificial Sequence
  VR-III
NDGS

SEQ ID NO: 56 - protein, 10 aa, Artificial Sequence
  VR-IV
INGSGQNQQT

SEQ ID NO: 57 - protein, 18 aa, Artificial Sequence
  VR-V
RVSTTTGQNNNSNFAWTA

SEQ ID NO: 58 - protein, 13 aa, Artificial Sequence
  VR-VI
HKEGEDRFFPLSG

SEQ ID NO: 59 - protein, 14 aa, Artificial Sequence
  VR-VII
KQNAARDNADYSDV

SEQ ID NO: 60 - protein, 13 aa, Artificial Sequence
  VR-VIII
ADNLQQQNTAPQI

SEQ ID NO: 61 - protein, 10 aa, Artificial Sequence
  VR-IX
NYYKSTSVDF

SEQ ID NO: 62 - DNA, 2211 bp, Artificial Sequence
  AAV6 VP1
atggctgccgatggttatcttccagattggctcgaggacaacctctctgagggcattcgcgagtggtgggacttgaaacctggagccccgaaacccaaagccaaccagcaaaagcaggacgacggccggggtctggtgcttcctggctacaagtacctcggacccttcaacggactcgacaagggggagcccgtcaacgcggcggatgcagcggccctcgagcacgacaaggcctacgaccagcagctcaaagcgggtgacaatccgtacctgcggtataaccacgccgacgccgagtttcaggagcgtctgcaagaagatacgtcttttgggggcaacctcgggcgagcagtcttccaggccaagaagagggttctcgaaccttttggtctggttgaggaaggtgctaagacggctcctggaaagaaacgtccggtagagcagtcgccacaagagccagactcctcctcgggcattggcaagacaggccagcagcccgctaaaaagagactcaattttggtcagactggcgactcagagtcagtccccgacccacaacctctcggagaacctccagcaacccccgctgctgtgggacctactacaatggcttcaggcggtggcgcaccaatggcagacaataacgaaggcgccgacggagtgggtaatgcctcaggaaattggcattgcgattccacatggctgggcgacagagtcatcaccaccagcacccgaacatgggccttgcccacctataacaaccacctctacaagcaaatctccagtgcttcaacgggggccagcaacgacaaccactacttcggctacagcaccccctgggggtattttgatttcaacagattccactgccatttctcaccacgtgactggcagcgactcatcaacaacaattggggattccggcccaagagactcaacttcaagctcttcaacatccaagtcaaggaggtcacgacgaatgatggcgtcacgaccatcgctaataaccttaccagcacggttcaagtcttctcggactcggagtaccagttgccgtacgtcctcggctctgcgcaccagggctgcctccctccgttcccggcggacgtgttcatgattccgcagtacggctacctaacgctcaacaatggcagccaggcagtgggacggtcatccttttactgcctggaatatttcccatcgcagatgctgagaacgggcaataactttaccttcagctacaccttcgaggacgtgcctttccacagcagctacgcgcacagccagagcctggaccggctgatgaatcctctcatcgaccagtacctgtattacctgaacagaactcagaatcagtccggaagtgcccaaaacaaggacttgctgtttagccgggggtctccagctggcatgtctgttcagcccaaaaactggctacctggaccctgttaccggcagcagcgcgtttctaaaacaaaaacagacaacaacaacagcaactttacctggactggtgcttcaaaatataaccttaatgggcgtgaatctataatcaaccctggcactgctatggcctcacacaaagacgacaaagacaagttctttcccatgagcggtgtcatgatttttggaaaggagagcgccggagcttcaaacactgcattggacaatgtcatgatcacagacgaagaggaaatcaaagccactaaccccgtggccaccgaaagatttgggactgtggcagtcaatctccagagcagcagcacagaccctgcgaccggagatgtgcatgttatgggagccttacctggaatggtgtggcaagacagagacgtatacctgcagggtcctatttgggccaaaattcctcacacggatggacactttcacccgtctcctctcatgggcggctttggacttaagcacccgcctcctcagatcctcatcaaaaacacgcctgttcctgcgaatcctccggcagagttttcggctacaaagtttgcttcattcatcacccagtattccacaggacaagtgagcgtggagattgaatgggagctgcagaaagaaaacagcaaacgctggaatcccgaagtgcagtatacatctaactatgcaaaatctgccaacgttgatttcactgtggacaacaatggactttatactgagcctcgccccattggcacccgttacctcacccgtcccctgtaa

SEQ ID NO: 63 - protein, 736 aa, Artificial Sequence
  AAV6 VP1
MAADGYLPDWLEDNLSEGIREWWDLKPGAPKPKANQQKQDDGRGLVLPGYKYLGPFNGLDKGEPVNAADAAALEHDKAYDQQLKAGDNPYLRYNHADAEFQERLQEDTSFGGNLGRAVFQAKKRVLEPFGLVEEGAKTAPGKKRPVEQSPQEPDSSSGIGKTGQQPAKKRLNFGQTGDSESVPDPQPLGEPPATPAAVGPTTMASGGGAPMADNNEGADGVGNASGNWHCDSTWLGDRVITTSTRTWALPTYNNHLYKQISSASTGASNDNHYFGYSTPWGYFDFNRFHCHFSPRDWQRLINNNWGFRPKRLNFKLFNIQVKEVTTNDGVTTIANNLTSTVQVFSDSEYQLPYVLGSAHQGCLPPFPADVFMIPQYGYLTLNNGSQAVGRSSFYCLEYFPSQMLRTGNNFTFSYTFEDVPFHSSYAHSQSLDRLMNPLIDQYLYYLNRTQNQSGSAQNKDLLFSRGSPAGMSVQPKNWLPGPCYRQQRVSKTKTDNNNSNFTWTGASKYNLNGRESIINPGTAMASHKDDKDKFFPMSGVMIFGKESAGASNTALDNVMITDEEEIKATNPVATERFGTVAVNLQSSSTDPATGDVHVMGALPGMVWQDRDVYLQGPIWAKIPHTDGHFHPSPLMGGFGLKHPPPQILIKNTPVPANPPAEFSATKFASFITQYSTGQVSVEIEWELQKENSKRWNPEVQYTSNYAKSANVDFTVDNNGLYTEPRPIGTRYLTRPL

SEQ ID NO: 64 - protein, 599 aa, Artificial Sequence
  AAV6 VP2
TAPGKKRPVEQSPQEPDSSSGIGKTGQQPAKKRLNFGQTGDSESVPDPQPLGEPPATPAAVGPTTMASGGGAPMADNNEGADGVGNASGNWHCDSTWLGDRVITTSTRTWALPTYNNHLYKQISSASTGASNDNHYFGYSTPWGYFDFNRFHCHFSPRDWQRLINNNWGFRPKRLNFKLFNIQVKEVTTNDGVTTIANNLTSTVQVFSDSEYQLPYVLGSAHQGCLPPFPADVFMIPQYGYLTLNNGSQAVGRSSFYCLEYFPSQMLRTGNNFTFSYTFEDVPFHSSYAHSQSLDRLMNPLIDQYLYYLNRTQNQSGSAQNKDLLFSRGSPAGMSVQPKNWLPGPCYRQQRVSKTKTDNNNSNFTWTGASKYNLNGRESIINPGTAMASHKDDKDKFFPMSGVMIFGKESAGASNTALDNVMITDEEEIKATNPVATERFGTVAVNLQSSSTDPATGDVHVMGALPGMVWQDRDVYLQGPIWAKIPHTDGHFHPSPLMGGFGLKHPPPQILIKNTPVPANPPAEFSATKFASFITQYSTGQVSVEIEWELQKENSKRWNPEVQYTSNYAKSANVDFTVDNNGLYTEPRPIGTRYLTRPL

SEQ ID NO: 65 - protein, 534 aa, Artificial Sequence
  AAV6 VP3
MASGGGAPMADNNEGADGVGNASGNWHCDSTWLGDRVITTSTRTWALPTYNNHLYKQISSASTGASNDNHYFGYSTPWGYFDFNRFHCHFSPRDWQRLINNNWGFRPKRLNFKLFNIQVKEVTTNDGVTTIANNLTSTVQVFSDSEYQLPYVLGSAHQGCLPPFPADVFMIPQYGYLTLNNGSQAVGRSSFYCLEYFPSQMLRTGNNFTFSYTFEDVPFHSSYAHSQSLDRLMNPLIDQYLYYLNRTQNQSGSAQNKDLLFSRGSPAGMSVQPKNWLPGPCYRQQRVSKTKTDNNNSNFTWTGASKYNLNGRESIINPGTAMASHKDDKDKFFPMSGVMIFGKESAGASNTALDNVMITDEEEIKATNPVATERFGTVAVNLQSSSTDPATGDVHVMGALPGMVWQDRDVYLQGPIWAKIPHTDGHFHPSPLMGGFGLKHPPPQILIKNTPVPANPPAEFSATKFASFITQYSTGQVSVEIEWELQKENSKRWNPEVQYTSNYAKSANVDFTVDNNGLYTEPRPIGTRYLTRPL

SEQ ID NO: 66 - DNA, 2217 bp, Artificial Sequence
  AAV8 VP1
atggctgccgatggttatcttccagattggctcgaggacaacctctctgagggcattcgcgagtggtgggcgctgaaacctggagccccgaagcccaaagccaaccagcaaaagcaggacgacggccggggtctggtgcttcctggctacaagtacctcggacccttcaacggactcgacaagggggagcccgtcaacgcggcggacgcagcggccctcgagcacgacaaggcctacgaccagcagctgcaggcgggtgacaatccgtacctgcggtataaccacgccgacgccgagtttcaggagcgtctgcaagaagatacgtcttttgggggcaacctcgggcgagcagtcttccaggccaagaagcgggttctcgaacctctcggtctggttgaggaaggcgctaagacggctcctggaaagaagagaccggtagagccatcaccccagcgttctccagactcctctacgggcatcggcaagaaaggccaacagcccgccagaaaaagactcaattttggtcagactggcgactcagagtcagttccagaccctcaacctctcggagaacctccagcagcgccctctggtgtgggacctaatacaatggctgcaggcggtggcgcaccaatggcagacaataacgaaggcgccgacggagtgggtagttcctcgggaaattggcattgcgattccacatggctgggcgacagagtcatcaccaccagcacccgaacctgggccctgcccacctacaacaaccacctctacaagcaaatctccaacgggacatcgggaggagccaccaacgacaacacctacttcggctacagcaccccctgggggtattttgactttaacagattccactgccacttttcaccacgtgactggcagcgactcatcaacaacaactggggattccggcccaagagactcagcttcaagctcttcaacatccaggtcaaggaggtcacgcagaatgaaggcaccaagaccatcgccaataacctcaccagcaccatccaggtgtttacggactcggagtaccagctgccgtacgttctcggctctgcccaccagggctgcctgcctccgttcccggcggacgtgttcatgattccccagtacggctacctaacactcaacaacggtagtcaggccgtgggacgctcctccttctactgcctggaatactttccttcgcagatgctgagaaccggcaacaacttccagtttacttacaccttcgaggacgtgcctttccacagcagctacgcccacagccagagcttggaccggctgatgaatcctctgattgaccagtacctgtactacttgtctcggactcaaacaacaggaggcacggcaaatacgcagactctgggcttcagccaaggtgggcctaatacaatggccaatcaggcaaagaactggctgccaggaccctgttaccgccaacaacgcgtctcaacgacaaccgggcaaaacaacaatagcaactttgcctggactgctgggaccaaataccatctgaatggaagaaattcattggctaatcctggcatcgctatggcaacacacaaagacgacgaggagcgtttttttcccagtaacgggatcctgatttttggcaaacaaaatgctgccagagacaatgcggattacagcgatgtcatgctcaccagcgaggaagaaatcaaaaccactaaccctgtggctacagaggaatacggtatcgtggcagataacttgcagcagcaaaacacggctcctcaaattggaactgtcaacagccagggggccttacccggtatggtctggcagaaccgggacgtgtacctgcagggtcccatctgggccaagattcctcacacggacggcaacttccacccgtctccgctgatgggcggctttggcctgaaacatcctccgcctcagatcctgatcaagaacacgcctgtacctgcggatcctccgaccaccttcaaccagtcaaagctgaactctttcatcacgcaatacagcaccggacaggtcagcgtggaaattgaatgggagctgcagaaggaaaacagcaagcgctggaaccccgagatccagtacacctccaactactacaaatctacaagtgtggactttgctgttaatacagaaggcgtgtactctgaaccccgccccattggcacccgttacctcacccgtaatctgtaa

SEQ ID NO: 67 - protein, 738 aa, Artificial Sequence
  AAV8 VP1
MAADGYLPDWLEDNLSEGIREWWALKPGAPKPKANQQKQDDGRGLVLPGYKYLGPFNGLDKGEPVNAADAAALEHDKAYDQQLQAGDNPYLRYNHADAEFQERLQEDTSFGGNLGRAVFQAKKRVLEPLGLVEEGAKTAPGKKRPVEPSPQRSPDSSTGIGKKGQQPARKRLNFGQTGDSESVPDPQPLGEPPAAPSGVGPNTMAAGGGAPMADNNEGADGVGSSSGNWHCDSTWLGDRVITTSTRTWALPTYNNHLYKQISNGTSGGATNDNTYFGYSTPWGYFDFNRFHCHFSPRDWQRLINNNWGFRPKRLSFKLFNIQVKEVTQNEGTKTIANNLTSTIQVFTDSEYQLPYVLGSAHQGCLPPFPADVFMIPQYGYLTLNNGSQAVGRSSFYCLEYFPSQMLRTGNNFQFTYTFEDVPFHSSYAHSQSLDRLMNPLIDQYLYYLSRTQTTGGTANTQTLGFSQGGPNTMANQAKNWLPGPCYRQQRVSTTTGQNNNSNFAWTAGTKYHLNGRNSLANPGIAMATHKDDEERFFPSNGILIFGKQNAARDNADYSDVMLTSEEEIKTTNPVATEEYGIVADNLQQQNTAPQIGTVNSQGALPGMVWQNRDVYLQGPIWAKIPHTDGNFHPSPLMGGFGLKHPPPQILIKNTPVPADPPTTFNQSKLNSFITQYSTGQVSVEIEWELQKENSKRWNPEIQYTSNYYKSTSVDFAVNTEGVYSEPRPIGTRYLTRNL

SEQ ID NO: 68 - protein, 601 aa, Artificial Sequence
  AAV8 VP2
MAPGKKRPVEPSPQRSPDSSTGIGKKGQQPARKRLNFGQTGDSESVPDPQPLGEPPAAPSGVGPNTMAAGGGAPMADNNEGADGVGSSSGNWHCDSTWLGDRVITTSTRTWALPTYNNHLYKQISNGTSGGATNDNTYFGYSTPWGYFDFNRFHCHFSPRDWQRLINNNWGFRPKRLSFKLFNIQVKEVTQNEGTKTIANNLTSTIQVFTDSEYQLPYVLGSAHQGCLPPFPADVFMIPQYGYLTLNNGSQAVGRSSFYCLEYFPSQMLRTGNNFQFTYTFEDVPFHSSYAHSQSLDRLMNPLIDQYLYYLSRTQTTGGTANTQTLGFSQGGPNTMANQAKNWLPGPCYRQQRVSTTTGQNNNSNFAWTAGTKYHLNGRNSLANPGIAMATHKDDEERFFPSNGILIFGKQNAARDNADYSDVMLTSEEEIKTTNPVATEEYGIVADNLQQQNTAPQIGTVNSQGALPGMVWQNRDVYLQGPIWAKIPHTDGNFHPSPLMGGFGLKHPPPQILIKNTPVPADPPTTFNQSKLNSFITQYSTGQVSVEIEWELQKENSKRWNPEIQYTSNYYKSTSVDFAVNTEGVYSEPRPIGTRYLTRNL

SEQ ID NO: 69 - protein, 535 aa, Artificial Sequence
  AAV8 VP3
MAAGGGAPMADNNEGADGVGSSSGNWHCDSTWLGDRVITTSTRTWALPTYNNHLYKQISNGTSGGATNDNTYFGYSTPWGYFDFNRFHCHFSPRDWQRLINNNWGFRPKRLSFKLFNIQVKEVTQNEGTKTIANNLTSTIQVFTDSEYQLPYVLGSAHQGCLPPFPADVFMIPQYGYLTLNNGSQAVGRSSFYCLEYFPSQMLRTGNNFQFTYTFEDVPFHSSYAHSQSLDRLMNPLIDQYLYYLSRTQTTGGTANTQTLGFSQGGPNTMANQAKNWLPGPCYRQQRVSTTTGQNNNSNFAWTAGTKYHLNGRNSLANPGIAMATHKDDEERFFPSNGILIFGKQNAARDNADYSDVMLTSEEEIKTTNPVATEEYGIVADNLQQQNTAPQIGTVNSQGALPGMVWQNRDVYLQGPIWAKIPHTDGNFHPSPLMGGFGLKHPPPQILIKNTPVPADPPTTFNQSKLNSFITQYSTGQVSVEIEWELQKENSKRWNPEIQYTSNYYKSTSVDFAVNTEGVYSEPRPIGTRYLTRNL

SEQ ID NO: 70 - DNA, 2214 bp, Artificial Sequence
  AAV9 VP1
atggctgccgatggttatcttccagattggctcgaggacaacctctctgagggcattcgcgagtggtgggcgctgaaacctggagccccgaagcccaaagccaaccagcaaaagcaggacgacggccggggtctggtgcttcctggctacaagtacctcggacccttcaacggactcgacaagggggagcccgtcaacgcggcggacgcagcggccctcgagcacggcaaggcctacgaccagcagctgcaggcgggtgacaatccgtacctgcggtataaccacgccgacgccgagtttcaggagcgtctgcaagaagatacgtcttttgggggcaacctcgggcgagcagtcttccaggccaagaagcgggttctcgaacctctcggtctggttgaggaaggcgctaagacggctcctggaaagaagagaccggtagagccatcaccccagcgttctccagactcctctacgggcatcggcaagaaaggccaacagcccgccagaaaaagactcaattttggtcagactggcgactcagagtcagttccagaccctcaacctctcggagaacctccagcagcgccctctggtgtgggacctaatacaatggctgcaggcggtggcgcaccaatggcagacaataacgaaggcgccgacggagtgggtaattcctcgggaaattggcattgcgattccacatggctgggggacagagtcatcaccaccagcacccgaacctgggcattgcccacctacaacaaccacctctacaagcaaatctccaatggaacatcgggaggaagcaccaacgacaacacctactttggctacagcaccccctgggggtattttgacttcaacagattccactgccacttctcaccacgtgactggcagcgactcatcaacaacaactggggattccggccaaagagactcaacttcaagctgttcaacatccaggtcaaggaggttacgacgaacgaaggcaccaagaccatcgccaataaccttaccagcaccgtccaggtctttacggactcggagtaccagctaccgtacgtcctaggctctgcccaccaaggatgcctgccaccgtttcctgcagacgtcttcatggttcctcagtacggctacctgacgctcaacaatggaagtcaagcgttaggacgttcttctttctactgtctggaatacttcccttctcagatgctgagaaccggcaacaactttcagttcagctacactttcgaggacgtgcctttccacagcagctacgcacacagccagagtctagatcgactgatgaaccccctcatcgaccagtacctatactacctggtcagaacacagacaactggaactgggggaactcaaactttggcattcagccaagcaggccctagctcaatggccaatcaggctagaaactgggtacccgggccttgctaccgtcagcagcgcgtctccacaaccaccaaccaaaataacaacagcaactttgcgtggacgggagctgctaaattcaagctgaacgggagagactcgctaatgaatcctggcgtggctatggcatcgcacaaagacgacgaggaccgcttctttccatcaagtggcgttctcatatttggcaagcaaggagccgggaacgatggagtcgactacagccaggtgctgattacagatgaggaagaaattaaagccaccaaccctgtagccacagaggaatacggagcagtggccatcaacaaccaggccgctaacacgcaggcgcaaactggacttgtgcataaccagggagttattcctggtatggtctggcagaaccgggacgtgtacctgcagggccctatttgggctaaaatacctcacacagatggcaactttcacccgtctcctctgatgggtggatttggactgaaacacccacctccacagattctaattaaaaatacaccagtgccggcagatcctcctcttaccttcaatcaagccaagctgaactctttcatcacgcagtacagcacgggacaagtcagcgtggaaatcgagtgggagctgcagaaagaaaacagcaagcgctggaatccagagatccagtatacttcaaactactacaaatctacaaatgtggactttgctgtcaataccaaaggtgtttactctgagcctcgccccattggtactcgttacctcacccgtaatttgtaa

SEQ ID NO: 71 - protein, 736 aa, Artificial Sequence
  AAV9 VP1
MAADGYLPDWLEDNLSEGIREWWALKPGAPQPKANQQHQDNARGLVLPGYKYLGPGNGLDKGEPVNAADAAALEHDKAYDQQLKAGDNPYLKYNHADAEFQERLKEDTSFGGNLGRAVFQAKKRLLEPLGLVEEAAKTAPGKKRPVEQSPQEPDSSAGIGKSGAQPAKKRLNFGQTGDTESVPDPQPIGEPPAAPSGVGSLTMASGGGAPVADNNEGADGVGSSSGNWHCDSQWLGDRVITTSTRTWALPTYNNHLYKQISNSTSGGSSNDNAYFGYSTPWGYFDFNRFHCHFSPRDWQRLINNNWGFRPKRLNFKLFNIQVKEVTDNNGVKTIANNLTSTVQVFTDSDYQLPYVLGSAHEGCLPPFPADVFMIPQYGYLTLNDGSQAVGRSSFYCLEYFPSQMLRTGNNFQFSYEFENVPFHSSYAHSQSLDRLMNPLIDQYLYYLSKTINGSGQNQQTLKFSVAGPSNMAVQGRNYIPGPSYRQQRVSTTVTQNNNSEFAWPGASSWALNGRNSLMNPGPAMASHKEGEDRFFPLSGSLIFGKQGTGRDNVDADKVMITNEEEIKTTNPVATESYGQVATNHQSAQAQAQTGWVQNQGILPGMVWQDRDVYLQGPIWAKIPHTDGNFHPSPLMGGFGMKHPPPQILIKNTPVPADPPTAFNKDKLNSFITQYSTGQVSVEIEWELQKENSKRWNPEIQYTSNYYKSNNVEFAVNTEGVYSEPRPIGTRYLTRNL

SEQ ID NO: 72 - protein, 599 aa, Artificial Sequence
  AAV9 VP2
MAPGKKRPVEQSPQEPDSSAGIGKSGAQPAKKRLNFGQTGDTESVPDPQPIGEPPAAPSGVGSLTMASGGGAPVADNNEGADGVGSSSGNWHCDSQWLGDRVITTSTRTWALPTYNNHLYKQISNSTSGGSSNDNAYFGYSTPWGYFDFNRFHCHFSPRDWQRLINNNWGFRPKRLNFKLFNIQVKEVTDNNGVKTIANNLTSTVQVFTDSDYQLPYVLGSAHEGCLPPFPADVFMIPQYGYLTLNDGSQAVGRSSFYCLEYFPSQMLRTGNNFQFSYEFENVPFHSSYAHSQSLDRLMNPLIDQYLYYLSKTINGSGQNQQTLKFSVAGPSNMAVQGRNYIPGPSYRQQRVSTTVTQNNNSEFAWPGASSWALNGRNSLMNPGPAMASHKEGEDRFFPLSGSLIFGKQGTGRDNVDADKVMITNEEEIKTTNPVATESYGQVATNHQSAQAQAQTGWVQNQGILPGMVWQDRDVYLQGPIWAKIPHTDGNFHPSPLMGGFGMKHPPPQILIKNTPVPADPPTAFNKDKLNSFITQYSTGQVSVEIEWELQKENSKRWNPEIQYTSNYYKSNNVEFAVNTEGVYSEPRPIGTRYLTRNL

SEQ ID NO: 73 - protein, 534 aa, Artificial Sequence
  AAV9 VP3
MASGGGAPVADNNEGADGVGSSSGNWHCDSQWLGDRVITTSTRTWALPTYNNHLYKQISNSTSGGSSNDNAYFGYSTPWGYFDFNRFHCHFSPRDWQRLINNNWGFRPKRLNFKLFNIQVKEVTDNNGVKTIANNLTSTVQVFTDSDYQLPYVLGSAHEGCLPPFPADVFMIPQYGYLTLNDGSQAVGRSSFYCLEYFPSQMLRTGNNFQFSYEFENVPFHSSYAHSQSLDRLMNPLIDQYLYYLSKTINGSGQNQQTLKFSVAGPSNMAVQGRNYIPGPSYRQQRVSTTVTQNNNSEFAWPGASSWALNGRNSLMNPGPAMASHKEGEDRFFPLSGSLIFGKQGTGRDNVDADKVMITNEEEIKTTNPVATESYGQVATNHQSAQAQAQTGWVQNQGILPGMVWQDRDVYLQGPIWAKIPHTDGNFHPSPLMGGFGMKHPPPQILIKNTPVPADPPTAFNKDKLNSFITQYSTGQVSVEIEWELQKENSKRWNPEIQYTSNYYKSNNVEFAVNTEGVYSEPRPIGTRYLTRNL

SEQ ID NO: 74 - protein, 6 aa, Artificial Sequence
  VRII-204/AAV6
TNDGVK

SEQ ID NO: 75 - protein, 4 aa, Artificial Sequence
  VRIII-204/AAV6
NNGS

SEQ ID NO: 76 - protein, 11 aa, Artificial Sequence
  VRIV-204/AAV6
QNQSGSAQNKD

SEQ ID NO: 77 - protein, 18 aa, Artificial Sequence
  VRV-204/AAV6
RVSKTKTDNNNSNFTWTG

SEQ ID NO: 78 - protein, 13 aa, Artificial Sequence
  VRVI-204/AAV6
HKDDKDKFFPMSG

SEQ ID NO: 79 - protein, 14 aa, Artificial Sequence
  VRVII-204/AAV6
KESAGASNTALDNV

SEQ ID NO: 80 - protein, 13 aa, Artificial Sequence
  VRVIII-204/AAV6
AVNLQNSSTDPAT

SEQ ID NO: 81 - protein, 10 aa, Artificial Sequence
  VRIX-204/AAV6
NYAKSANVDF

SEQ ID NO: 82 - DNA, 2211 bp, Artificial Sequence
  AAV214-AB VP1
atggctgccgatggttatcttccagattggctcgaggacaacctctctgagggcattcgcgagtggtgggcgctgaaacctggagccccgaagcccaaagccaaccagcaaaagcaggacgacggccggggtctggtgcttcctggctacaagtacctcggacccttcaacggactcgacaagggggagcccgtcaacgcggcggacgcagcggccctcgagcacgacaaggcctacgaccagcagctcaaagcgggtgacaatccgtacctgcggtataaccacgccgacgccgagtttcaggagcgtctgcaagaagatacgtcttttgggggcaacctcgggcgagcagtcttccaggccaagaagcgggttctcgaaccttttggtctggttgaggaaggtgctaagacggctcctggaaagaaacgtccggtagagcagtcgccacaagagccagactcctcctcgggcatcggcaagacaggccagcagcccgctaaaaagagactcaattttggtcagactggcgactcagagtcagtccccgacccacaacctctcggagaacctccagcaacccccgctgctgtgggacctactacaatggcttcaggcggtggcgcaccaatggcggacaataacgaaggcgccgacggagtgggtaatgcctcaggaaattggcattgcgattccacatggctgggcgacagagtcatcaccaccagcacccgcacctgggccttgcccacctacaataaccacctctacaagcaaatctccagcagcacatctggaggatcttcaaatgacaacgcctacttcggctacagcaccccctgggggtattttgacttcaacagattccactgccacttttcaccacgtgactggcaaagactcatcaacaacaactggggattccgacccaagagactcaacttcaagctctttaacattcaagtcaaagaggttacggacaacaatggagtcaagaccatcgccaataaccttaccagcacggtccaggtcttcacggactcagactatcagctcccgtacgtcctcggctctgcgcaccagggctgcctccctccgttcccggcggacgtgttcatgattccgcagtacggctacctaacgctcaacgacggcagccaggcagtgggacggtcatccttttactgcctggaatatttcccatcgcagatgctgagaacgggcaacaactttaccttcagctacacctttgaggacgttcctttccacagcagctacgctcacagccagagtctggaccgtctcatgaatcctctgattgaccagtacctgtactacttgtctaagactatcaacggatccggccagaatcagcagactctgaagttcagccaaggtgggcctaatacaatggccaatcaggcaaagaactggctgccaggaccctgttaccgccaacaacgcgtctcaacgacaaccgggcaaaacaacaatagcaactttgcctggactgctgggaccaaataccatctgaatggaagaaattcattgatgaatcctggccccgctatggcatcccacaaagagggcgaggaccgtttttttcccctgtccgggtccctgatttttggcaaacaaaatgctgccagagacaatgcggattacagcgatgtcatgctcaccagcgaggaagaaatcaaaaccactaaccctgtggctacagaggaatacggtatcgtggcagataacttgcagcagcaaaacacggctcctcaaattggaactgtcaacagccagggggccttacccggtatggtctggcagaaccgggacgtgtacctgcagggtcccatctgggccaagattcctcacacggacggcaacttccacccgtctccgctgatgggcggctttggcctgaaacatcctccgcctcagatcctgatcaagaacacgcctgtacctgcggatcctccgaccaccttcaaccagtcaaagctgaactctttcatcacgcaatacagcaccggacaggtcagcgtggaaattgaatgggagctgcagaaggaaaacagcaagcgctggaaccccgagatccagtacacctccaactactacaaatctacaagtgtggactttgctgttaatacagaaggcgtgtactctgaaccccaccccattggcacccgttacctcacccgtcccctgtaa

SEQ ID NO: 83 - DNA, 1605 bp, Artificial Sequence
  AAV214-AB VP3
atggcttcaggcggtggcgcaccaatggcggacaataacgaaggcgccgacggagtgggtaatgcctcaggaaattggcattgcgattccacatggctgggcgacagagtcatcaccaccagcacccgcacctgggccttgcccacctacaataaccacctctacaagcaaatctccagcagcacatctggaggatcttcaaatgacaacgcctacttcggctacagcaccccctgggggtattttgacttcaacagattccactgccacttttcaccacgtgactggcaaagactcatcaacaacaactggggattccgacccaagagactcaacttcaagctctttaacattcaagtcaaagaggttacggacaacaatggagtcaagaccatcgccaataaccttaccagcacggtccaggtcttcacggactcagactatcagctcccgtacgtcctcggctctgcgcaccagggctgcctccctccgttcccggcggacgtgttcatgattccgcagtacggctacctaacgctcaacgacggcagccaggcagtgggacggtcatccttttactgcctggaatatttcccatcgcagatgctgagaacgggcaacaactttaccttcagctacacctttgaggacgttcctttccacagcagctacgctcacagccagagtctggaccgtctcatgaatcctctgattgaccagtacctgtactacttgtctaagactatcaacggatccggccagaatcagcagactctgaagttcagccaaggtgggcctaatacaatggccaatcaggcaaagaactggctgccaggaccctgttaccgccaacaacgcgtctcaacgacaaccgggcaaaacaacaatagcaactttgcctggactgctgggaccaaataccatctgaatggaagaaattcattgatgaatcctggccccgctatggcatcccacaaagagggcgaggaccgtttttttcccctgtccgggtccctgatttttggcaaacaaaatgctgccagagacaatgcggattacagcgatgtcatgctcaccagcgaggaagaaatcaaaaccactaaccctgtggctacagaggaatacggtatcgtggcagataacttgcagcagcaaaacacggctcctcaaattggaactgtcaacagccagggggccttacccggtatggtctggcagaaccgggacgtgtacctgcagggtcccatctgggccaagattcctcacacggacggcaacttccacccgtctccgctgatgggcggctttggcctgaaacatcctccgcctcagatcctgatcaagaacacgcctgtacctgcggatcctccgaccaccttcaaccagtcaaagctgaactctttcatcacgcaatacagcaccggacaggtcagcgtggaaattgaatgggagctgcagaaggaaaacagcaagcgctggaaccccgagatccagtacacctccaactactacaaatctacaagtgtggactttgctgttaatacagaaggcgtgtactctgaaccccaccccattggcacccgttacctcacccgtcccctgtaa

SEQ ID NO: 84 - protein, 736 aa, Artificial Sequence
  AAV214AB VP1
MAADGYLPDWLEDNLSEGIREWWALKPGAPKPKANQQKQDDGRGLVLPGYKYLGPFNGLDKGEPVNAADAAALEHDKAYDQQLKAGDNPYLRYNHADAEFQERLQEDTSFGGNLGRAVFQAKKRVLEPFGLVEEGAKTAPGKKRPVEQSPQEPDSSSGIGKTGQQPAKKRLNFGQTGDSESVPDPQPLGEPPATPAAVGPTTMASGGGAPMADNNEGADGVGNASGNWHCDSTWLGDRVITTSTRTWALPTYNNHLYKQISSSTSGGSSNDNAYFGYSTPWGYFDFNRFHCHFSPRDWQRLINNNWGFRPKRLNFKLFNIQVKEVTDNNGVKTIANNLTSTVQVFTDSDYQLPYVLGSAHQGCLPPFPADVFMIPQYGYLTLNDGSQAVGRSSFYCLEYFPSQMLRTGNNFTFSYTFEDVPFHSSYAHSQSLDRLMNPLIDQYLYYLSKTINGSGQNQQTLKFSQGGPNTMANQAKNWLPGPCYRQQRVSTTTGQNNNSNFAWTAGTKYHLNGRNSLMNPGPAMASHKEGEDRFFPLSGSLIFGKQNAARDNADYSDVMLTSEEEIKTTNPVATEEYGIVADNLQQQNTAPQIGTVNSQGALPGMVWQNRDVYLQGPIWAKIPHTDGNFHPSPLMGGFGLKHPPPQILIKNTPVPADPPTTFNQSKLNSFITQYSTGQVSVEIEWELQKENSKRWNPEIQYTSNYYKSTSVDFAVNTEGVYSEPHPIGTRYLTRPL

SEQ ID NO: 85 - protein, 599 aa, Artificial Sequence
  AAV214AB VP2
MAPGKKRPVEQSPQEPDSSSGIGKTGQQPAKKRLNFGQTGDSESVPDPQPLGEPPATPAAVGPTTMASGGGAPMADNNEGADGVGNASGNWHCDSTWLGDRVITTSTRTWALPTYNNHLYKQISSSTSGGSSNDNAYFGYSTPWGYFDFNRFHCHFSPRDWQRLINNNWGFRPKRLNFKLFNIQVKEVTDNNGVKTIANNLTSTVQVFTDSDYQLPYVLGSAHQGCLPPFPADVFMIPQYGYLTLNDGSQAVGRSSFYCLEYFPSQMLRTGNNFTFSYTFEDVPFHSSYAHSQSLDRLMNPLIDQYLYYLSKTINGSGQNQQTLKFSQGGPNTMANQAKNWLPGPCYRQQRVSTTTGQNNNSNFAWTAGTKYHLNGRNSLMNPGPAMASHKEGEDRFFPLSGSLIFGKQNAARDNADYSDVMLTSEEEIKTTNPVATEEYGIVADNLQQQNTAPQIGTVNSQGALPGMVWQNRDVYLQGPIWAKIPHTDGNFHPSPLMGGFGLKHPPPQILIKNTPVPADPPTTFNQSKLNSFITQYSTGQVSVEIEWELQKENSKRWNPEIQYTSNYYKSTSVDFAVNTEGVYSEPHPIGTRYLTRPL

SEQ ID NO: 86 - protein, 534 aa, Artificial Sequence
  AAV214AB VP3
MASGGGAPMADNNEGADGVGNASGNWHCDSTWLGDRVITTSTRTWALPTYNNHLYKQISSSTSGGSSNDNAYFGYSTPWGYFDFNRFHCHFSPRDWQRLINNNWGFRPKRLNFKLFNIQVKEVTDNNGVKTIANNLTSTVQVFTDSDYQLPYVLGSAHQGCLPPFPADVFMIPQYGYLTLNDGSQAVGRSSFYCLEYFPSQMLRTGNNFTFSYTFEDVPFHSSYAHSQSLDRLMNPLIDQYLYYLSKTINGSGQNQQTLKFSQGGPNTMANQAKNWLPGPCYRQQRVSTTTGQNNNSNFAWTAGTKYHLNGRNSLMNPGPAMASHKEGEDRFFPLSGSLIFGKQNAARDNADYSDVMLTSEEEIKTTNPVATEEYGIVADNLQQQNTAPQIGTVNSQGALPGMVWQNRDVYLQGPIWAKIPHTDGNFHPSPLMGGFGLKHPPPQILIKNTPVPADPPTTFNQSKLNSFITQYSTGQVSVEIEWELQKENSKRWNPEIQYTSNYYKSTSVDFAVNTEGVYSEPHPIGTRYLTRPL

SEQ ID NO: 87 - protein, 8 aa, Artificial Sequence
  AAV214AB VR-1 amino acid
SSTSGGSS

SEQ ID NO: 88 - DNA, 6719 bp, Artificial Sequence
  pA-CF1
tcctgcaggcagctgcgcgctcgctcgctcactgaggccgcccgggcaaagcccgggcgtcgggcgacctttggtcgcccggcctcagtgagcgagcgagcgcgcagagagggagtggccaactccatcactaggggttcctgcggccgcatggaggcggtactatgtagatgagaattcaggagcaaactgggaaaagcaactgcttccaaatatttgtgatttttacagtgtagttttggaaaaactcttagcctaccaattcttctaagtgttttaaaatgtgggagccagtacacatgaagttatagagtgttttaatgaggcttaaatatttaccgtaactatgaaatgctacgcatatcatgctgttcaggctccgtggccacgcaactcataccggtagtactcgccaccatgcagagaagccccctggagaaggcctctgtggtgagcaagctgttcttcagctggaccagacccatcctgagaaagggctacagacagagactggagctgtctgacatctaccagatcccctctgtggactctgctgacaacctgtctgagaagctggagagagagtgggacagagagctggccagcaagaagaaccccaagctgatcaatgccctgagaagatgcttcttctggagattcatgttctatggcatcttcctgtacctgggggaggtgaccaaggctgtgcagcccctgctgctgggcagaatcattgccagctatgaccctgacaacaaggaggagagaagcattgccatctacctgggcattggcctgtgcctgctgttcattgtgagaaccctgctgctgcaccctgccatctttggcctgcaccacattggcatgcagatgagaattgccatgttcagcctgatctacaagaagaccctgaagctgagcagcagagtgctggacaagatcagcattggccagctggtgagcctgctgagcaacaacctgaacaagtttgatgagggcctggccctggcccactttgtgtggattgcccccctgcaggtggccctgctgatgggcctgatctgggagctgctgcaggcctctgccttctgtggcctgggcttcctgattgtgctggccctgttccaggctggcctgggcagaatgatgatgaagtacagagaccagagagctggcaagatctctgagagactggtgatcacctctgagatgattgagaacatccagtctgtgaaggcctactgctgggaggaggccatggagaagatgattgagaacctgagacagacagagctgaagctgaccagaaaggctgcctatgtgagatacttcaacagctctgccttcttcttctctggcttctttgtggtgttcctgtctgtgctgccctatgccctgatcaagggcatcatcctgagaaagatcttcaccaccatcagcttctgcattgtgctgagaatggctgtgaccagacagttcccctgggctgtgcagacctggtatgacagcctgggggccatcaacaagatccaggacttcctgcagaagcaggagtacaagaccctggagtacaacctgaccaccacagaggtggtgatggagaatgtgacagccttctgggaggagggctttggggagctgtttgagaaggccaagcagaacaacaacaacagaaagaccagcaatggggatgacagcctgttcttcagcaacttcagcctgctgggcacccctgtgctgaaggacatcaacttcaagattgagagaggccagctgctggctgtggctggcagcacaggggctggcaagaccagcctgctgatgatgatcatgggggagctggagccctctgagggcaagatcaagcactctggcagaatcagcttctgcagccagttcagctggatcatgcctggcaccatcaaggagaacatcatctttggggtgagctatgatgagtacagatacagatctgtgatcaaggcctgccagctggaggaggacatcagcaagtttgctgagaaggacaacattgtgctgggggaggggggcatcaccctgtctgggggccagagagccagaatcagcctggccagagctgtgtacaaggatgctgacctgtacctgctggacagcccctttggctacctggatgtgctgacagagaaggagatctttgagagctgtgtgtgcaagctgatggccaacaagaccagaatcctggtgaccagcaagatggagcacctgaagaaggctgacaagatcctgatcctgcatgagggcagcagctacttctatggcaccttctctgagctgcagaacctgcagcctgacttcagcagcaagctgatgggctgtgacagctttgaccagttctctgctgagagaagaaacagcatcctgacagagaccctgcacagattcagcctggagggggatgcccctgtgagctggacagagaccaagaagcagagcttcaagcagacaggggagtttggggagaagagaaagaacagcatcctgaaccccatcaacagcaccctgcaggccagaagaagacagtctgtgctgaacctgatgacccactctgtgaaccagggccagaacatccacagaaagaccacagccagcaccagaaaggtgagcctggccccccaggccaacctgacagagctggacatctacagcagaagactgagccaggagacaggcctggagatctctgaggagatcaatgaggaggacctgaaggagtgcttctttgatgacatggagagcatccctgctgtgaccacctggaacacctacctgagatacatcacagtgcacaagagcctgatctttgtgctgatctggtgcctggtgatcttcctggctgaggtggctgccagcctggtggtgctgtggctgctgggcaacacccccctgcaggacaagggcaacagcacccacagcagaaacaacagctatgctgtgatcatcaccagcaccagcagctactatgtgttctacatctatgtgggggtggctgacaccctgctggccatgggcttcttcagaggcctgcccctggtgcacaccctgatcacagtgagcaagatcctgcaccacaagatgctgcactctgtgctgcaggcccccatgagcaccctgaacaccctgaaggctgggggcatcctgaacagattcagcaaggacattgccatcctggatgacctgctgcccctgaccatctttgacttcatccagctgctgctgattgtgattggggccattgctgtggtggctgtgctgcagccctacatctttgtggccacagtgcctgtgattgtggccttcatcatgctgagagcctacttcctgcagaccagccagcagctgaagcagctggagtctgagggcagaagccccatcttcacccacctggtgaccagcctgaagggcctgtggaccctgagagcctttggcagacagccctactttgagaccctgttccacaaggccctgaacctgcacacagccaactggttcctgtacctgagcaccctgagatggttccagatgagaattgagatgatctttgtgatcttcttcattgctgtgaccttcatcagcatcctgaccacaggggagggggagggcagagtgggcatcatcctgaccctggccatgaacatcatgagcaccctgcagtgggctgtgaacagcagcattgatgtggacagcctgatgagatctgtgagcagagtgttcaagttcattgacatgcccacagagggcaagcccaccaagagcaccaagccctacaagaatggccagctgagcaaggtgatgatcattgagaacagccatgtgaagaaggatgacatctggccctctgggggccagatgacagtgaaggacctgacagccaagtacacagaggggggcaatgccatcctggagaacatcagcttcagcatcagccctggccagagagtgggcctgctgggcagaacaggctctggcaagagcaccctgctgtctgccttcctgagactgctgaacacagagggggagatccagattgatggggtgagctgggacagcatcaccctgcagcagtggagaaaggcctttggggtgatcccccagaaggtgttcatcttctctggcaccttcagaaagaacctggacccctatgagcagtggtctgaccaggagatctggaaggtggctgatgaggtgggcctgagatctgtgattgagcagttccctggcaagctggactttgtgctggtggatgggggctgtgtgctgagccatggccacaagcagctgatgtgcctggccagatctgtgctgagcaaggccaagatcctgctgctggatgagccctctgcccacctggaccctgtgacctaccagatcatcagaagaaccctgaagcaggcctttgctgactgcacagtgatcctgtgtgagcacagaattgaggccatgctggagtgccagcagttcctggtgattgaggagaacaaggtgagacagtatgacagcatccagaagctgctgaatgagagaagcctgttcagacaggccatcagcccctctgacagagtgaagctgttcccccacagaaacagcagcaagtgcaagagcaagccccagattgctgccctgaaggaggagaccgaggaggaggtgcaggacaccagactgtaaataaaatacgaaatggatctgaggaacccctagtgatggagttggccactccctctctgcgcgctcgctcgctcactgaggccgggcgaccaaaggtcgcccgacgcccgggctttgcccgggcggcctcagtgagcgagcgagcgcgcagagagggagtggccaattaattaaggcgatgaacggtaatcgtaaaactagcatgtcaatcatatgtaccccggttgataatcagaaaagccccaaaaacaggaagattgtataagcattaattaatttaaatacatggacatgtcagaattggttaattggttgtaacactgacccctatttgtttatttttctaaatacattcaaatatgtatccgctcatgagacaataaccctgataaatgcttcaataatattgaaaaaggaagaatatgagccatattcaacgggaaacgtcgaggccgcgattaaattccaacatggatgctgatttatatgggtataaatgggctcgcgataatgtcgggcaatcaggtgcgacaatctatcgcttgtatgggaagcccgatgcgccagagttgtttctgaaacatggcaaaggtagcgttgccaatgatgttacagatgagatggtcagactaaactggctgacggaatttatgccacttccgaccatcaagcattttatccgtactcctgatgatgcatggttactcaccactgcgatccccggaaaaacagcgttccaggtattagaagaatatcctgattcaggtgaaaatattgttgatgcgctggcagtgttcctgcgccggttgcactcgattcctgtttgtaattgtccttttaacagcgatcgcgtatttcgcctcgctcaggcgcaatcacgaatgaataacggtttggttgatgcgagtgattttgatgacgagcgtaatggctggcctgttgaacaagtctggaaagaaatgcataaacttttgccattctcaccggattcagtcgtcactcatggtgatttctcacttgataaccttatttttgacgaggggaaattaataggttgtattgatgttggacgagtcggaatcgcagaccgataccaggatcttgccatcctatggaactgcctcggtgagttttctccttcattacagaaacggctttttcaaaaatatggtattgataatcctgatatgaataaattgcagtttcatttgatgctcgatgagtttttctaaaagcagagcattacgctgacttgacgggacggcgcaagctcatgaccaaaatcccttaacgtgagttacgcgcgcgtcgttccactgagcgtcagaccccgtagaaaagatcaaaggatcttcttgagatcctttttttctgcgcgtaatctgctgcttgcaaacaaaaaaaccaccgctaccagcggtggtttgtttgccggatcaagagctaccaactctttttccgaaggtaactggcttcagcagagcgcagataccaaatactgttcttctagtgtagccgtagttagcccaccacttcaagaactctgtagcaccgcctacatacctcgctctgctaatcctgttaccagtggctgctgccagtggcgataagtcgtgtcttaccgggttggactcaagacgatagttaccggataaggcgcagcggtcgggctgaacggggggttcgtgcacacagcccagcttggagcgaacgacctacaccgaactgagatacctacagcgtgagctatgagaaagcgccacgcttcccgaagggagaaaggcggacaggtatccggtaagcggcagggtcggaacaggagagcgcacgagggagcttccagggggaaacgcctggtatctttatagtcctgtcgggtttcgccacctctgacttgagcgtcgatttttgtgatgctcgtcaggggggcggagcctatggaaaaacgccagcaacgcggcctttttacggttcctggccttttgctggccttttgctcacatgtttaaaccatg

SEQ ID NO: 89 - DNA, 6751 bp, Artificial Sequence
  pA-CF3
tcctgcaggcagctgcgcgctcgctcgctcactgaggccgcccgggcaaagcccgggcgtcgggcgacctttggtcgcccggcctcagtgagcgagcgagcgcgcagagagggagtggccaactccatcactaggggttcctgcggccgcatggaggcggtactatgtagatgagaattcaggagcaaactgggaaaagcaactgcttccaaatatttgtgatttttacagtgtagttttggaaaaactcttagcctaccaattcttctaagtgttttaaaatgtgggagccagtacacatgaagttatagagtgttttaatgaggcttaaatatttaccgtaactatgaaatgctacgcatatcatgctgttcaggctccgtggccacgcaactcataccggtagtactcgccaccatgcagagaagccccctggagaaggcctctgtggtgagcaagctgttcttcagctggaccagacccatcctgagaaagggctacagacagagactggagctgtctgacatctaccagatcccctctgtggactctgctgacaacctgtctgagaagctggagagagagtgggacagagagctggccagcaagaagaaccccaagctgatcaatgccctgagaagatgcttcttctggagattcatgttctatggcatcttcctgtacctgggggaggtgaccaaggctgtgcagcccctgctgctgggcagaatcattgccagctatgaccctgacaacaaggaggagagaagcattgccatctacctgggcattggcctgtgcctgctgttcattgtgagaaccctgctgctgcaccctgccatctttggcctgcaccacattggcatgcagatgagaattgccatgttcagcctgatctacaagaagaccctgaagctgagcagcagagtgctggacaagatcagcattggccagctggtgagcctgctgagcaacaacctgaacaagtttgatgagggcctggccctggcccactttgtgtggattgcccccctgcaggtggccctgctgatgggcctgatctgggagctgctgcaggcctctgccttctgtggcctgggcttcctgattgtgctggccctgttccaggctggcctgggcagaatgatgatgaagtacagagaccagagagctggcaagatctctgagagactggtgatcacctctgagatgattgagaacatccagtctgtgaaggcctactgctgggaggaggccatggagaagatgattgagaacctgagacagacagagctgaagctgaccagaaaggctgcctatgtgagatacttcaacagctctgccttcttcttctctggcttctttgtggtgttcctgtctgtgctgccctatgccctgatcaagggcatcatcctgagaaagatcttcaccaccatcagcttctgcattgtgctgagaatggctgtgaccagacagttcccctgggctgtgcagacctggtatgacagcctgggggccatcaacaagatccaggacttcctgcagaagcaggagtacaagaccctggagtacaacctgaccaccacagaggtggtgatggagaatgtgacagccttctgggaggagggctttggggagctgtttgagaaggccaagcagaacaacaacaacagaaagaccagcaatggggatgacagcctgttcttcagcaacttcagcctgctgggcacccctgtgctgaaggacatcaacttcaagattgagagaggccagctgctggctgtggctggcagcacaggggctggcaagaccagcctgctgatgatgatcatgggggagctggagccctctgagggcaagatcaagcactctggcagaatcagcttctgcagccagttcagctggatcatgcctggcaccatcaaggagaacatcatctttggggtgagctatgatgagtacagatacagatctgtgatcaaggcctgccagctggaggaggacatcagcaagtttgctgagaaggacaacattgtgctgggggaggggggcatcaccctgtctgggggccagagagccagaatcagcctggccagagctgtgtacaaggatgctgacctgtacctgctggacagcccctttggctacctggatgtgctgacagagaaggagatctttgagagctgtgtgtgcaagctgatggccaacaagaccagaatcctggtgaccagcaagatggagcacctgaagaaggctgacaagatcctgatcctgcatgagggcagcagctacttctatggcaccttctctgagctgcagaacctgcagcctgacttcagcagcaagctgatgggctgtgacagctttgaccagttctctgctgagagaagaaacagcatcctgacagagaccctgcacagattcagcctggagggggatgcccctgtgagctggacagagaccaagaagcagagcttcaagcagacaggggagtttggggagaagagaaagaacagcatcctgaaccccatcaacagcaccctgcaggccagaagaagacagtctgtgctgaacctgatgacccactctgtgaaccagggccagaacatccacagaaagaccacagccagcaccagaaaggtgagcctggccccccaggccaacctgacagagctggacatctacagcagaagactgagccaggagacaggcctggagatctctgaggagatcaatgaggaggacctgaaggagtgcttctttgatgacatggagagcatccctgctgtgaccacctggaacacctacctgagatacatcacagtgcacaagagcctgatctttgtgctgatctggtgcctggtgatcttcctggctgaggtggctgccagcctggtggtgctgtggctgctgggcaacacccccctgcaggacaagggcaacagcacccacagcagaaacaacagctatgctgtgatcatcaccagcaccagcagctactatgtgttctacatctatgtgggggtggctgacaccctgctggccatgggcttcttcagaggcctgcccctggtgcacaccctgatcacagtgagcaagatcctgcaccacaagatgctgcactctgtgctgcaggcccccatgagcaccctgaacaccctgaaggctgggggcatcctgaacagattcagcaaggacattgccatcctggatgacctgctgcccctgaccatctttgacttcatccagctgctgctgattgtgattggggccattgctgtggtggctgtgctgcagccctacatctttgtggccacagtgcctgtgattgtggccttcatcatgctgagagcctacttcctgcagaccagccagcagctgaagcagctggagtctgagggcagaagccccatcttcacccacctggtgaccagcctgaagggcctgtggaccctgagagcctttggcagacagccctactttgagaccctgttccacaaggccctgaacctgcacacagccaactggttcctgtacctgagcaccctgagatggttccagatgagaattgagatgatctttgtgatcttcttcattgctgtgaccttcatcagcatcctgaccacaggggagggggagggcagagtgggcatcatcctgaccctggccatgaacatcatgagcaccctgcagtgggctgtgaacagcagcattgatgtggacagcctgatgagatctgtgagcagagtgttcaagttcattgacatgcccacagagggcaagcccaccaagagcaccaagccctacaagaatggccagctgagcaaggtgatgatcattgagaacagccatgtgaagaaggatgacatctggccctctgggggccagatgacagtgaaggacctgacagccaagtacacagaggggggcaatgccatcctggagaacatcagcttcagcatcagccctggccagagagtgggcctgctgggcagaacaggctctggcaagagcaccctgctgtctgccttcctgagactgctgaacacagagggggagatccagattgatggggtgagctgggacagcatcaccctgcagcagtggagaaaggcctttggggtgatcccccagaaggtgttcatcttctctggcaccttcagaaagaacctggacccctatgagcagtggtctgaccaggagatctggaaggtggctgatgaggtgggcctgagatctgtgattgagcagttccctggcaagctggactttgtgctggtggatgggggctgtgtgctgagccatggccacaagcagctgatgtgcctggccagatctgtgctgagcaaggccaagatcctgctgctggatgagccctctgcccacctggaccctgtgacctaccagatcatcagaagaaccctgaagcaggcctttgctgactgcacagtgatcctgtgtgagcacagaattgaggccatgctggagtgccagcagttcctggtgattgaggagaacaaggtgagacagtatgacagcatccagaagctgctgaatgagagaagcctgttcagacaggccatcagcccctctgacagagtgaagctgttcccccacagaaacagcagcaagtgcaagagcaagccccagattgctgccctgaaggaggagaccgaggaggaggtgcaggacaccagactgtaaataaatatctttattttcattacatctgtgtgttggttttttgtgtggatctgaggaacccctagtgatggagttggccactccctctctgcgcgctcgctcgctcactgaggccgggcgaccaaaggtcgcccgacgcccgggctttgcccgggcggcctcagtgagcgagcgagcgcgcagagagggagtggccaattaattaaggcgatgaacggtaatcgtaaaactagcatgtcaatcatatgtaccccggttgataatcagaaaagccccaaaaacaggaagattgtataagcattaattaatttaaatacatggacatgtcagaattggttaattggttgtaacactgacccctatttgtttatttttctaaatacattcaaatatgtatccgctcatgagacaataaccctgataaatgcttcaataatattgaaaaaggaagaatatgagccatattcaacgggaaacgtcgaggccgcgattaaattccaacatggatgctgatttatatgggtataaatgggctcgcgataatgtcgggcaatcaggtgcgacaatctatcgcttgtatgggaagcccgatgcgccagagttgtttctgaaacatggcaaaggtagcgttgccaatgatgttacagatgagatggtcagactaaactggctgacggaatttatgccacttccgaccatcaagcattttatccgtactcctgatgatgcatggttactcaccactgcgatccccggaaaaacagcgttccaggtattagaagaatatcctgattcaggtgaaaatattgttgatgcgctggcagtgttcctgcgccggttgcactcgattcctgtttgtaattgtccttttaacagcgatcgcgtatttcgcctcgctcaggcgcaatcacgaatgaataacggtttggttgatgcgagtgattttgatgacgagcgtaatggctggcctgttgaacaagtctggaaagaaatgcataaacttttgccattctcaccggattcagtcgtcactcatggtgatttctcacttgataaccttatttttgacgaggggaaattaataggttgtattgatgttggacgagtcggaatcgcagaccgataccaggatcttgccatcctatggaactgcctcggtgagttttctccttcattacagaaacggctttttcaaaaatatggtattgataatcctgatatgaataaattgcagtttcatttgatgctcgatgagtttttctaaaagcagagcattacgctgacttgacgggacggcgcaagctcatgaccaaaatcccttaacgtgagttacgcgcgcgtcgttccactgagcgtcagaccccgtagaaaagatcaaaggatcttcttgagatcctttttttctgcgcgtaatctgctgcttgcaaacaaaaaaaccaccgctaccagcggtggtttgtttgccggatcaagagctaccaactctttttccgaaggtaactggcttcagcagagcgcagataccaaatactgttcttctagtgtagccgtagttagcccaccacttcaagaactctgtagcaccgcctacatacctcgctctgctaatcctgttaccagtggctgctgccagtggcgataagtcgtgtcttaccgggttggactcaagacgatagttaccggataaggcgcagcggtcgggctgaacggggggttcgtgcacacagcccagcttggagcgaacgacctacaccgaactgagatacctacagcgtgagctatgagaaagcgccacgcttcccgaagggagaaaggcggacaggtatccggtaagcggcagggtcggaacaggagagcgcacgagggagcttccagggggaaacgcctggtatctttatagtcctgtcgggtttcgccacctctgacttgagcgtcgatttttgtgatgctcgtcaggggggcggagcctatggaaaaacgccagcaacgcggcctttttacggttcctggccttttgctggccttttgctcacatgtttaaaccatg

SEQ ID NO: 90 - DNA, 6603 bp, Artificial Sequence
  pA-CF5
tcctgcaggcagctgcgcgctcgctcgctcactgaggccgcccgggcaaagcccgggcgtcgggcgacctttggtcgcccggcctcagtgagcgagcgagcgcgcagagagggagtggccaactccatcactaggggttcctgcggccgcaatatttgcatgtcgctatgtgttctgggaaatcaccataaacgtgaaatgtctttggatttgggaatcttcgaagttctgtatgagaccacagatctccaccggtagtactcgccaccatgcagagaagccccctggagaaggcctctgtggtgagcaagctgttcttcagctggaccagacccatcctgagaaagggctacagacagagactggagctgtctgacatctaccagatcccctctgtggactctgctgacaacctgtctgagaagctggagagagagtgggacagagagctggccagcaagaagaaccccaagctgatcaatgccctgagaagatgcttcttctggagattcatgttctatggcatcttcctgtacctgggggaggtgaccaaggctgtgcagcccctgctgctgggcagaatcattgccagctatgaccctgacaacaaggaggagagaagcattgccatctacctgggcattggcctgtgcctgctgttcattgtgagaaccctgctgctgcaccctgccatctttggcctgcaccacattggcatgcagatgagaattgccatgttcagcctgatctacaagaagaccctgaagctgagcagcagagtgctggacaagatcagcattggccagctggtgagcctgctgagcaacaacctgaacaagtttgatgagggcctggccctggcccactttgtgtggattgcccccctgcaggtggccctgctgatgggcctgatctgggagctgctgcaggcctctgccttctgtggcctgggcttcctgattgtgctggccctgttccaggctggcctgggcagaatgatgatgaagtacagagaccagagagctggcaagatctctgagagactggtgatcacctctgagatgattgagaacatccagtctgtgaaggcctactgctgggaggaggccatggagaagatgattgagaacctgagacagacagagctgaagctgaccagaaaggctgcctatgtgagatacttcaacagctctgccttcttcttctctggcttctttgtggtgttcctgtctgtgctgccctatgccctgatcaagggcatcatcctgagaaagatcttcaccaccatcagcttctgcattgtgctgagaatggctgtgaccagacagttcccctgggctgtgcagacctggtatgacagcctgggggccatcaacaagatccaggacttcctgcagaagcaggagtacaagaccctggagtacaacctgaccaccacagaggtggtgatggagaatgtgacagccttctgggaggagggctttggggagctgtttgagaaggccaagcagaacaacaacaacagaaagaccagcaatggggatgacagcctgttcttcagcaacttcagcctgctgggcacccctgtgctgaaggacatcaacttcaagattgagagaggccagctgctggctgtggctggcagcacaggggctggcaagaccagcctgctgatgatgatcatgggggagctggagccctctgagggcaagatcaagcactctggcagaatcagcttctgcagccagttcagctggatcatgcctggcaccatcaaggagaacatcatctttggggtgagctatgatgagtacagatacagatctgtgatcaaggcctgccagctggaggaggacatcagcaagtttgctgagaaggacaacattgtgctgggggaggggggcatcaccctgtctgggggccagagagccagaatcagcctggccagagctgtgtacaaggatgctgacctgtacctgctggacagcccctttggctacctggatgtgctgacagagaaggagatctttgagagctgtgtgtgcaagctgatggccaacaagaccagaatcctggtgaccagcaagatggagcacctgaagaaggctgacaagatcctgatcctgcatgagggcagcagctacttctatggcaccttctctgagctgcagaacctgcagcctgacttcagcagcaagctgatgggctgtgacagctttgaccagttctctgctgagagaagaaacagcatcctgacagagaccctgcacagattcagcctggagggggatgcccctgtgagctggacagagaccaagaagcagagcttcaagcagacaggggagtttggggagaagagaaagaacagcatcctgaaccccatcaacagcaccctgcaggccagaagaagacagtctgtgctgaacctgatgacccactctgtgaaccagggccagaacatccacagaaagaccacagccagcaccagaaaggtgagcctggccccccaggccaacctgacagagctggacatctacagcagaagactgagccaggagacaggcctggagatctctgaggagatcaatgaggaggacctgaaggagtgcttctttgatgacatggagagcatccctgctgtgaccacctggaacacctacctgagatacatcacagtgcacaagagcctgatctttgtgctgatctggtgcctggtgatcttcctggctgaggtggctgccagcctggtggtgctgtggctgctgggcaacacccccctgcaggacaagggcaacagcacccacagcagaaacaacagctatgctgtgatcatcaccagcaccagcagctactatgtgttctacatctatgtgggggtggctgacaccctgctggccatgggcttcttcagaggcctgcccctggtgcacaccctgatcacagtgagcaagatcctgcaccacaagatgctgcactctgtgctgcaggcccccatgagcaccctgaacaccctgaaggctgggggcatcctgaacagattcagcaaggacattgccatcctggatgacctgctgcccctgaccatctttgacttcatccagctgctgctgattgtgattggggccattgctgtggtggctgtgctgcagccctacatctttgtggccacagtgcctgtgattgtggccttcatcatgctgagagcctacttcctgcagaccagccagcagctgaagcagctggagtctgagggcagaagccccatcttcacccacctggtgaccagcctgaagggcctgtggaccctgagagcctttggcagacagccctactttgagaccctgttccacaaggccctgaacctgcacacagccaactggttcctgtacctgagcaccctgagatggttccagatgagaattgagatgatctttgtgatcttcttcattgctgtgaccttcatcagcatcctgaccacaggggagggggagggcagagtgggcatcatcctgaccctggccatgaacatcatgagcaccctgcagtgggctgtgaacagcagcattgatgtggacagcctgatgagatctgtgagcagagtgttcaagttcattgacatgcccacagagggcaagcccaccaagagcaccaagccctacaagaatggccagctgagcaaggtgatgatcattgagaacagccatgtgaagaaggatgacatctggccctctgggggccagatgacagtgaaggacctgacagccaagtacacagaggggggcaatgccatcctggagaacatcagcttcagcatcagccctggccagagagtgggcctgctgggcagaacaggctctggcaagagcaccctgctgtctgccttcctgagactgctgaacacagagggggagatccagattgatggggtgagctgggacagcatcaccctgcagcagtggagaaaggcctttggggtgatcccccagaaggtgttcatcttctctggcaccttcagaaagaacctggacccctatgagcagtggtctgaccaggagatctggaaggtggctgatgaggtgggcctgagatctgtgattgagcagttccctggcaagctggactttgtgctggtggatgggggctgtgtgctgagccatggccacaagcagctgatgtgcctggccagatctgtgctgagcaaggccaagatcctgctgctggatgagccctctgcccacctggaccctgtgacctaccagatcatcagaagaaccctgaagcaggcctttgctgactgcacagtgatcctgtgtgagcacagaattgaggccatgctggagtgccagcagttcctggtgattgaggagaacaaggtgagacagtatgacagcatccagaagctgctgaatgagagaagcctgttcagacaggccatcagcccctctgacagagtgaagctgttcccccacagaaacagcagcaagtgcaagagcaagccccagattgctgccctgaaggaggagaccgaggaggaggtgcaggacaccagactgtaaataaatatctttattttcattacatctgtgtgttggttttttgtgtggatctgaggaacccctagtgatggagttggccactccctctctgcgcgctcgctcgctcactgaggccgggcgaccaaaggtcgcccgacgcccgggctttgcccgggcggcctcagtgagcgagcgagcgcgcagagagggagtggccaattaattaaggcgatgaacggtaatcgtaaaactagcatgtcaatcatatgtaccccggttgataatcagaaaagccccaaaaacaggaagattgtataagcattaattaatttaaatacatggacatgtcagaattggttaattggttgtaacactgacccctatttgtttatttttctaaatacattcaaatatgtatccgctcatgagacaataaccctgataaatgcttcaataatattgaaaaaggaagaatatgagccatattcaacgggaaacgtcgaggccgcgattaaattccaacatggatgctgatttatatgggtataaatgggctcgcgataatgtcgggcaatcaggtgcgacaatctatcgcttgtatgggaagcccgatgcgccagagttgtttctgaaacatggcaaaggtagcgttgccaatgatgttacagatgagatggtcagactaaactggctgacggaatttatgccacttccgaccatcaagcattttatccgtactcctgatgatgcatggttactcaccactgcgatccccggaaaaacagcgttccaggtattagaagaatatcctgattcaggtgaaaatattgttgatgcgctggcagtgttcctgcgccggttgcactcgattcctgtttgtaattgtccttttaacagcgatcgcgtatttcgcctcgctcaggcgcaatcacgaatgaataacggtttggttgatgcgagtgattttgatgacgagcgtaatggctggcctgttgaacaagtctggaaagaaatgcataaacttttgccattctcaccggattcagtcgtcactcatggtgatttctcacttgataaccttatttttgacgaggggaaattaataggttgtattgatgttggacgagtcggaatcgcagaccgataccaggatcttgccatcctatggaactgcctcggtgagttttctccttcattacagaaacggctttttcaaaaatatggtattgataatcctgatatgaataaattgcagtttcatttgatgctcgatgagtttttctaaaagcagagcattacgctgacttgacgggacggcgcaagctcatgaccaaaatcccttaacgtgagttacgcgcgcgtcgttccactgagcgtcagaccccgtagaaaagatcaaaggatcttcttgagatcctttttttctgcgcgtaatctgctgcttgcaaacaaaaaaaccaccgctaccagcggtggtttgtttgccggatcaagagctaccaactctttttccgaaggtaactggcttcagcagagcgcagataccaaatactgttcttctagtgtagccgtagttagcccaccacttcaagaactctgtagcaccgcctacatacctcgctctgctaatcctgttaccagtggctgctgccagtggcgataagtcgtgtcttaccgggttggactcaagacgatagttaccggataaggcgcagcggtcgggctgaacggggggttcgtgcacacagcccagcttggagcgaacgacctacaccgaactgagatacctacagcgtgagctatgagaaagcgccacgcttcccgaagggagaaaggcggacaggtatccggtaagcggcagggtcggaacaggagagcgcacgagggagcttccagggggaaacgcctggtatctttatagtcctgtcgggtttcgccacctctgacttgagcgtcgatttttgtgatgctcgtcaggggggcggagcctatggaaaaacgccagcaacgcggcctttttacggttcctggccttttgctggccttttgctcacatgtttaaaccatg

SEQ ID NO: 91 - DNA, 7519 bp, Artificial Sequence
  pA-CF7
tcctgcaggcagctgcgcgctcgctcgctcactgaggccgcccgggcaaagcccgggcgtcgggcgacctttggtcgcccggcctcagtgagcgagcgagcgcgcagagagggagtggccaactccatcactaggggttcctgcggccgcaatatttgcatgtcgctatgtgttctgggaaatcaccataaacgtgaaatgtctttggatttgggaatcttcgaagttctgtatgagaccacagatctccaccggtagtactcgccaccatgcagagaagccccctggagaaggcctctgtggtgagcaagctgttcttcccccctggagaaggcctctgtggtgagcaagctgttcttcagctggaccagacccatcctgagaaagggctacagacagagactggagctgtctgacatctaccagatcccctctgtggactctgctgacaacctgtctgagaagctggagagagagtgggacagagagctggccagcaagaagaaccccaagctgatcaatgccctgagaagatgcttcttctggagattcatgttctatggcatcttcctgtacctgggggaggtgaccaaggctgtgcagcccctgctgctgggcagaatcattgccagctatgacccagcccctgctgctgggcagaatcattgccagctatgaccctgacaacaaggaggagagaagcattgccatctacctgggcattggcctgtgcctgctgttcattgtgagaaccctgctgctgcaccctgccatctttggcctgcaccacattggcatgcagatgagaattgccatgttcagcctgatctacaagaagaccctgaagctgagcagcagagtgctggacaagatcagcattggccagctggtgagcctgctgagcaacaacctgaacaagtttgatgagggcctggccctggcccactttgtgtggattgcttgatgagggcctggccctggcccactttgtgtggattgcccccctgcaggtggccctgctgatgggcctgatctgggagctgctgcaggcctctgccttctgtggcctgggcttcctgattgtgctggccctgttccaggctggcctgggcagaatgatgatgaagtacagagaccagagagctggcaagatctctgagagactggtgatcacctctgagatgattgagaacatccagtctgtgaaggcctactgctgggaggaggccatggagaagatgattgagaacctgagacagacagagctgaagctgaccagaaaggctgcctatgtgagatacttcaacagctctgccttcttcttctctggcttctttgtggtgttcctgtctgtgctgcctctgccttcttcttctctggcttctttgtggtgttcctgtctgtgctgccctatgccctgatcaagggcatcatcctgagaaagatcttcaccaccatcagcttctgcattgtgctgagaatggctgtgaccagacagttcccctgggctgtgcagacctggtatgacagcctgggggccatcaacaagatccaggacttcctgcagaagcaggagtacaagaccctggagtacaacctgaccaccacagaggtggtgatggagaatgtgacagccttctgggaggagggctttggggagctgtttgagaaggccaagcagaacaacaacaacagaaagaccagcaatggggatgacagcctgttcttcagcaacttcagcctgctgggcacccctgtgcggatgacagcctgttcttcagcaacttcagcctgctgggcacccctgtgctgaaggacatcaacttcaagattgagagaggccagctgctggctgtggctggcagcacaggggctggcaagaccagcctgctgatgatgatcatgggggagctggagccctctgagggcaagatcaagcactctggcagaatcagcttctgcagccagttcagctggatcatgcctggcaccatcaaggagaacatcatctttggggtgagctatgatgagtacagatacagatctgtgatcaaggcctgccagctggaggaggacatcaagatctgtgatcaaggcctgccagctggaggaggacatcagcaagtttgctgagaaggacaacattgtgctgggggaggggggcatcaccctgtctgggggccagagagccagaatcagcctggccagagctgtgtacaaggatgctgacctgtacctgctggacagcccctttggctacctggatgtgctgacagagaaggagatctttgagagctgtgtgtgcaagctgatggccaacaagaccagaatcctggtgaccagcaagatggagcacctgaagaaggctgacaagatcctgatcctgcatgagggcagcagagaaggctgacaagatcctgatcctgcatgagggcagcagctacttctatggcaccttctctgagctgcagaacctgcagcctgacttcagcagcaagctgatgggctgtgacagctttgaccagttctctgctgagagaagaaacagcatcctgacagagaccctgcacagattcagcctggagggggatgcccctgtgagctggacagagaccaagaagcagagcttcaagcagacaggggagtttggggagaagagaaagaacagcatcctgaaccccatcaacagcatcagaaagttcagcattgtgcagaagacccatcaacagcatcagaaagttcagcattgtgcagaagacccccctgcagatgaatggcattgaggaggactctgatgagcccctggagagaagactgagcctggtgcctgactctgagcagggggaggccatcctgcccagaatctctgtgatcagcacaggccccaccctgcaggccagaagaagacagtctgtgctgaacctgatgacccactctgtgaaccagggccagaacatccaccactctgtgaaccagggccagaacatccacagaaagaccacagccagcaccagaaaggtgagcctggccccccaggccaacctgacagagctggacatctacagcagaagactgagccaggagacaggcctggagatctctgaggagatcaatgaggaggacctgaaggagtgcttctttgatgacatggagagcatccctgctgtgaccacctggaacacctacctgagatacatcacagtgcacaagagcctgatctttgtgctgatctggtgcctggtgatcttcctggctgaggtggctgccagcctggtggtgcgtgatcttcctggctgaggtggctgccagcctggtggtgctgtggctgctgggcaacacccccctgcaggacaagggcaacagcacccacagcagaaacaacagctatgctgtgatcatcaccagcaccagcagctactatgtgttctacatctatgtgggggtggctgacaccctgctggccatgggcttcttcagaggcctgcccctggtgcacaccctgatcacagtgagcaagatcctgcaccacaagatgctgcactctgtgctgcaggcccccatgagcaccctgaacaccctgaaggctgggggcatcctgaatgagcaccctgaacaccctgaaggctgggggcatcctgaacagattcagcaaggacattgccatcctggatgacctgctgcccctgaccatctttgacttcatccagctgctgctgattgtgattggggccattgctgtggtggctgtgctgcagccctacatctttgtggccacagtgcctgtgattgtggccttcatcatgctgagagcctacttcctgcagaccagccagcagctgaagcagctggagtctgagggcagaagccccatcttcacccacctggtgaccagcctgaagggcctgtggaccctgagagcccctggtgaccagcctgaagggcctgtggaccctgagagcctttggcagacagccctactttgagaccctgttccacaaggccctgaacctgcacacagccaactggttcctgtacctgagcaccctgagatggttccagatgagaattgagatgatctttgtgatcttcttcattgctgtgaccttcatcagcatcctgaccacaggggagggggagggcagagtgggcatcatcctgaccctggccatgaacatcatgagcaccctgcagtgggctgtgaacagcagcattgatgtggacagcctgatgagatctgtgagcagagtgttcaagttcattgacatgcccacagagggcaagcccaccaagagcaccaagccctacaagaatggccagctgcagagggcaagcccaccaagagcaccaagccctacaagaatggccagctgagcaaggtgatgatcattgagaacagccatgtgaagaaggatgacatctggccctctgggggccagatgacagtgaaggacctgacagccaagtacacagaggggggcaatgccatcctggagaacatcagcttcagcatcagccctggccagagagtgggcctgctgggcagaacaggctctggcaagagcaccctgctgtctgccttcctgagactgctgaacacagagggggagatccagattgatggggtgagctgggacagcatcaccctgcagcagtggagaaaggcctttggggtgatcccccagaaggtgttcatcttctctggcaccttcagaaagaacctgtgatcccccagaaggtgttcatcttctctggcaccttcagaaagaacctggacccctatgagcagtggtctgaccaggagatctggaaggtggctgatgaggtgggcctgagatctgtgattgagcagttccctggcaagctggactttgtgctggtggatgggggctgtgtgctgagccatggccacaagcagctgatgtgcctggccagatctgtgctgagcaaggccaagatcctgctgctggatgagccctctgcccacctggaccctgtgacctaccagatcatcagaagaaccctgaagcaggcctttgctgaaccagatcatcagaagaaccctgaagcaggcctttgctgactgcacagtgatcctgtgtgagcacagaattgaggccatgctggagtgccagcagttcctggtgattgaggagaacaaggtgagacagtatgacagcatccagaagctgctgaatgagagaagcctgttcagacaggccatcagcccctctgacagagtgaagctgttcccccacagaaacagcagcaagtgcaagagcaagccccagattgctgccctgaaggaggagaccgaggaggaggtgcaggacaccagactgtaaataaatatctttattttcattacatctgtgtgttggttttttgtgtggatctgaggaacccctagtgatggagttggccactccctctctgcgcgctcatctgaggaacccctagtgatggagttggccactccctctctgcgcgctcgctcgctcactgaggccgggcgaccaaaggtcgcccgacgcccgggctttgcccgggcggcctcagtgagcgagcgagcgcgcagagagggagtggccaattaattaaggcgatgaacggtaatcgtaaaactagcatgtcaatcatatgtaccccggttgataatcagaaaagccccaaaaacaggaagattgtataagcattaattaatttaaatacatggacatgtcagaattggttaattggttgtaacactgacccctatttgtttatttttctaaatacattcaaatatgtatccgctcatgagacaataaccctgataaatgcttcaataatattgaaaaaggaagaatatgagccatattcaacgggaaacgtcgaggccgcgattaaattccaacatggatgctgatttatatgggtataaatgggctcgcgataatgtcgggcaatcaggtgcgacaatctatcgcttgtatgggaagcccgatgcgccagagttgtttcgataatgtcgggcaatcaggtgcgacaatctatcgcttgtatgggaagcccgatgcgccagagttgtttctgaaacatggcaaaggtagcgttgccaatgatgttacagatgagatggtcagactaaactggctgacggaatttatgccacttccgaccatcaagcattttatccgtactcctgatgatgcatggttactcaccactgcgatccccggaaaaacagcgttccaggtattagaagaatatcctgattcaggtgaaaatattgttgatgcgctggcagtgttcctgcgccggttgcactcgattcctgtttgtaattgtccttttaacagcgatcgcgtatttcgcctcgctcaggcgcaatcacgaatgaataacggtttggttgatgcgagtgattttgatgacgagcgtaatggctggcctgttgaacaagtctggaaagaaatgcataaacttttgccattctcaccggattcagtcgtcactcatggtgatttctcacttgataaccttatttttgacgaggggaaattaataggttgtattgatgttggacgagtcggaatcgcagaccgataccaggatcttgccatcctatggaactgcctcggtgagttttctccttcattacagaaacggctttttcaaaaatatggtattgataatcctgatatgaataaattgcagtttcatttgatgctcgatgagtttttctaaaagcagagcattacgctgacttgacgggacggcgcaagctcatgaccaaaatcccttaacgtgagttacgcgcgcgtcgttccactgagcgtcagaccccgtagaaaagatcaaaggatcttcttgagatcctttttttctgcgcgtaatctgctgcttgcaaacaaaaaaaccaccgctaccagcggtggtttgtttgccggatcaagagctaccaactctttttccgaaggtaactggcttcagcagagcgcagataccaaatactgttcttctagtgtagccgtagttagcccaccacttcaagaactctgtagcaccgcctacatacctcgctctgctaatcctgttaccagtggctgctgccagtggcgataagtcgtgtcttaccgggttggactcaagacgatagttaccggataaggcgcagcggtcgggctgaacggggggttcgtgcacacagcccagcttggaccagcttggagcgaacgacctacaccgaactgagatacctacagcgtgagctatgagaaagcgccacgcttcccgaagggagaaaggcggacaggtatccggtaagcggcagggtcggaacaggagagcgcacgagggagcttccagggggaaacgcctggtatctttatagtcctgtcgggtttcgccacctctgacttgagcgtcgatttttgtgatgctcgtcaggggggcggagcctatggaaaaacgccagcaacgcggcctttttacggttcctggccttttgctggccttttgctcacatgtttaaaccatg

SEQ ID NO: 92 - DNA, 11577 bp, Artificial Sequence
  pHELPK plasmid DNA
ggtacccaactccatgcttaacagtccccaggtacagcccaccctgcgtcgcaaccaggaacagctctacagcttcctggagcgccactcgccctacttccgcagccacagtgcgcagattaggagcgccacttctttttgtcacttgaaaaacatgtaaaaataatgtactaggagacactttcaataaaggcaaatgtttttatttgtacactctcgggtgattatttaccccccacccttgccgtctgcgccgtttaaaaatcaaaggggttctgccgcgcatcgctatgcgccactggcagggacacgttgcgatactggtgtttagtgctccacttaaactcaggcacaaccatccgcggcagctcggtgaagttttcactccacaggctgcgcaccatcaccaacgcgtttagcaggtcgggcgccgatatcttgaagtcgcagttggggcctccgccctgcgcgcgcgagttgcgatacacagggttgcagcactggaacactatcagcgccgggtggtgcacgctggccagcacgctcttgtcggagatcagatccgcgtccaggtcctccgcgttgctcagggcgaacggagtcaactttggtagctgccttcccaaaaagggtgcatgcccaggctttgagttgcactcgcaccgtagtggcatcagaaggtgaccgtgcccggtctgggcgttaggatacagcgcctgcatgaaagccttgatctgcttaaaagccacctgagcctttgcgccttcagagaagaacatgccgcaagacttgccggaaaactgattggccggacaggccgcgtcatgcacgcagcaccttgcgtcggtgttggagatctgcaccacatttcggccccaccggttcttcacgatcttggccttgctagactgctccttcagcgcgcgctgcccgttttcgctcgtcacatccatttcaatcacgtgctccttatttatcataatgctcccgtgtagacacttaagctcgccttcgatctcagcgcagcggtgcagccacaacgcgcagcccgtgggctcgtggtgcttgtaggttacctctgcaaacgactgcaggtacgcctgcaggaatcgccccatcatcgtcacaaaggtcttgttgctggtgaaggtcagctgcaacccgcggtgctcctcgtttagccaggtcttgcatacggccgccagagcttccacttggtcaggcagtagcttgaagtttgcctttagatcgttatccacgtggtacttgtccatcaacgcgcgcgcagcctccatgcccttctcccacgcagacacgatcggcaggctcagcgggtttatcaccgtgctttcactttccgcttcactggactcttccttttcctcttgcgtccgcataccccgcgccactgggtcgtcttcattcagccgccgcaccgtgcgcttacctcccttgccgtgcttgattagcaccggtgggttgctgaaacccaccatttgtagcgccacatcttctctttcttcctcgctgtccacgatcacctctggggatggcgggcgctcgggcttgggagaggggcgcttctttttctttttggacgcaatggccaaatccgccgtcgaggtcgatggccgcgggctgggtgtgcgcggcaccagcgcatcttgtgacgagtcttcttcgtcctcggactcgagacgccgcctcagccgcttttttgggggcgcgcggggaggcggcggcgacggcgacggggacgacacgtcctccatggttggtggacgtcgcgccgcaccgcgtccgcgctcgggggtggtttcgcgctgctcctcttcccgactggccatttccttctcctataggcagaaaaagatcatggagtcagtcgagaaggaggacagcctaaccgccccctttgagttcgccaccaccgcctccaccgatgccgccaacgcgcctaccaccttccccgtcgaggcacccccgcttgaggaggaggaagtgattatcgagcaggacccaggttttgtaagcgaagacgacgaggatcgctcagtaccaacagaggataaaaagcaagaccaggacgacgcagaggcaaacgaggaacaagtcgggcggggggaccaaaggcatggcgactacctagatgtgggagacgacgtgctgttgaagcatctgcagcgccagtgcgccattatctgcgacgcgttgcaagagcgcagcgatgtgcccctcgccatagcggatgtcagccttgcctacgaacgccacctgttctcaccgcgcgtaccccccaaacgccaagaaaacggcacatgcgagcccaacccgcgcctcaacttctaccccgtatttgccgtgccagaggtgcttgccacctatcacatctttttccaaaactgcaagatacccctatcctgccgtgccaaccgcagccgagcggacaagcagctggccttgcggcagggcgctgtcatacctgatatcgcctcgctcgacgaagtgccaaaaatctttgagggtcttggacgcgacgagaaacgcgcggcaaacgctctgcaacaagaaaacagcgaaaatgaaagtcactgtggagtgctggtggaacttgagggtgacaacgcgcgcctagccgtgctgaaacgcagcatcgaggtcacccactttgcctacccggcacttaacctaccccccaaggttatgagcacagtcatgagcgagctgatcgtgcgccgtgcacgacccctggagagggatgcaaacttgcaagaacaaaccgaggagggcctacccgcagttggcgatgagcagctggcgcgctggcttgagacgcgcgagcctgccgacttggaggagcgacgcaagctaatgatggccgcagtgcttgttaccgtggagcttgagtgcatgcagcggttctttgctgacccggagatgcagcgcaagctagaggaaacgttgcactacacctttcgccagggctacgtgcgccaggcctgcaaaatttccaacgtggagctctgcaacctggtctcctaccttggaattttgcacgaaaaccgcctcgggcaaaacgtgcttcattccacgctcaagggcgaggcgcgccgcgactacgtccgcgactgcgtttacttatttctgtgctacacctggcaaacggccatgggcgtgtggcagcaatgcctggaggagcgcaacctaaaggagctgcagaagctgctaaagcaaaacttgaaggacctatggacggccttcaacgagcgctccgtggccgcgcacctggcggacattatcttccccgaacgcctgcttaaaaccctgcaacagggtctgccagacttcaccagtcaaagcatgttgcaaaactttaggaactttatcctagagcgttcaggaattctgcccgccacctgctgtgcgcttcctagcgactttgtgcccattaagtaccgtgaatgccctccgccgctttggggtcactgctaccttctgcagctagccaactaccttgcctaccactccgacatcatggaagacgtgagcggtgacggcctactggagtgtcactgtcgctgcaacctatgcaccccgcaccgctccctggtctgcaattcgcaactgcttagcgaaagtcaaattatcggtacctttgagctgcagggtccctcgcctgacgaaaagtccgcggctccggggttgaaactcactccggggctgtggacgtcggcttaccttcgcaaatttgtacctgaggactaccacgcccacgagattaggttctacgaagaccaatcccgcccgccaaatgcggagcttaccgcctgcgtcattacccagggccacatccttggccaattgcaagccatcaacaaagcccgccaagagtttctgctacgaaagggacggggggtttacctggacccccagtccggcgaggagctcaacccaatccccccgccgccgcagccctatcagcagccgcgggcccttgcttcccaggatggcacccaaaaagaagctgcagctgccgccgccgccacccacggacgaggaggaatactgggacagtcaggcagaggaggttttggacgaggaggaggagatgatggaagactgggacagcctagacgaagcttccgaggccgaagaggtgtcagacgaaacaccgtcaccctcggtcgcattcccctcgccggcgccccagaaattggcaaccgttcccagcatcgctacaacctccgctcctcaggcgccgccggcactgcctgttcgccgacccaaccgtagatgggacaccactggaaccagggccggtaagtctaagcagccgccgccgttagcccaagagcaacaacagcgccaaggctaccgctcgtggcgcgggcacaagaacgccatagttgcttgcttgcaagactgtgggggcaacatctccttcgcccgccgctttcttctctaccatcacggcgtggccttcccccgtaacatcctgcattactaccgtcatctctacagcccctactgcaccggcggcagcggcagcggcagcaacagcagcggtcacacagaagcaaaggcgaccggatagcaagactctgacaaagcccaagaaatccacagcggcggcagcagcaggaggaggagcgctgcgtctggcgcccaacgaacccgtatcgacccgcgagcttagaaataggatttttcccactctgtatgctatatttcaacaaagcaggggccaagaacaagagctgaaaataaaaaacaggtctctgcgctccctcacccgcagctgcctgtatcacaaaagcgaagatcagcttcggcgcacgctggaagacgcggaggctctcttcagcaaatactgcgcgctgactcttaaggactagtttcgcgccctttctcaaatttaagcgcgaaaactacgtcatctccagcggccacacccggcgccagcacctgtcgtcagcgccattatgagcaaggaaattcccacgccctacatgtggagttaccagccacaaatgggacttgcggctggagctgcccaagactactcaacccgaataaactacatgagcgcgggaccccacatgatatcccgggtcaacggaatccgcgcccaccgaaaccgaattctcctcgaacaggcggctattaccaccacacctcgtaataaccttaatccccgtagttggcccgctgccctggtgtaccaggaaagtcccgctcccaccactgtggtacttcccagagacgcccaggccgaagttcagatgactaactcaggggcgcagcttgcgggcggctttcgtcacagggtgcggtcgcccgggcgttttagggcggagtaacttgcatgtattgggaattgtagtttttttaaaatgggaagtgacgtatcgtgggaaaacggaagtgaagatttgaggaagttgtgggttttttggctttcgtttctgggcgtaggttcgcgtgcggttttctgggtgttttttgtggactttaaccgttacgtcattttttagtcctatatatactcgctctgtacttggccctttttacactgtgactgattgagctggtgccgtgtcgagtggtgttttttaataggtttttttactggtaaggctgactgttatggctgccgctgtggaagcgctgtatgttgttctggagcgggagggtgctattttgcctaggcaggagggtttttcaggtgtttatgtgtttttctctcctattaattttgttatacctcctatgggggctgtaatgttgtctctacgcctgcgggtatgtattcccccgggctatttcggtcgctttttagcactgaccgatgttaaccaacctgatgtgtttaccgagtcttacattatgactccggacatgaccgaggaactgtcggtggtgctttttaatcacggtgaccagtttttttacggtcacgccggcatggccgtagtccgtcttatgcttataagggttgtttttcctgttgtaagacaggcttctaatgtttaaatgtttttttttttgttattttattttgtgtttaatgcaggaacccgcagacatgtttgagagaaaaatggtgtctttttctgtggtggttccggaacttacctgcctttatctgcatgagcatgactacgatgtgcttgcttttttgcgcgaggctttgcctgattttttgagcagcaccttgcattttatatcgccgcccatgcaacaagcttacataggggctacgctggttagcatagctccgagtatgcgtgtcataatcagtgtgggttcttttgtcatggttcctggcggggaagtggccgcgctggtccgtgcagacctgcacgattatgttcagctggccctgcgaagggacctacgggatcgcggtatttttgttaatgttccgcttttgaatcttatacaggtctgtgaggaacctgaatttttgcaatcatgattcgctgcttgaggctgaaggtggagggcgctctggagcagatttttacaatggccggacttaatattcgggatttgcttagagacatattgataaggtggcgagatgaaaattatttgggcatggttgaaggtgctggaatgtttatagaggagattcaccctgaagggtttagcctttacgtccacttggacgtgagggcagtttgccttttggaagccattgtgcaacatcttacaaatgccattatctgttctttggctgtagagtttgaccacgccaccggaggggagcgcgttcacttaatagatcttcattttgaggttttggataatcttttggaataaaaaaaaaaaaacatggttcttccagctcttcccgctcctcccgtgtgtgactcgcagaacgaatgtgtaggttggctgggtgtggcttattctgcggtggtggatgttatcagggcagcggcgcatgaaggagtttacatagaacccgaagccagggggcgcctggatgctttgagagagtggatatactacaactactacacagagcgagctaagcgacgagaccggagacgcagatctgtttgtcacgcccgcacctggttttgcttcaggaaatatgactacgtccggcgttccatttggcatgacactacgaccaacacgatctcggttgtctcggcgcactccgtacagtagggatcgcctacctccttttgagacagagacccgcgctaccatactggaggatcatccgctgctgcccgaatgtaacactttgacaatgcacaacgtgagttacgtgcgaggtcttccctgcagtgtgggatttacgctgattcaggaatgggttgttccctgggatatggttctgacgcgggaggagcttgtaatcctgaggaagtgtatgcacgtgtgcctgtgttgtgccaacattgatatcatgacgagcatgatgatccatggttacgagtcctgggctctccactgtcattgttccagtcccggttccctgcagtgcatagccggcgggcaggttttggccagctggtttaggatggtggtggatggcgccatgtttaatcagaggtttatatggtaccgggaggtggtgaattacaacatgccaaaagaggtaatgtttatgtccagcgtgtttatgaggggtcgccacttaatctacctgcgcttgtggtatgatggccacgtgggttctgtggtccccgccatgagctttggatacagcgccttgcactgtgggattttgaacaatattgtggtgctgtgctgcagttactgtgctgatttaagtgagatcagggtgcgctgctgtgcccggaggacaaggcgtctcatgctgcgggcggtgcgaatcatcgctgaggagaccactgccatgttgtattcctgcaggacggagcggcggcggcagcagtttattcgcgcgctgctgcagcaccaccgccctatcctgatgcacgattatgactctacccccatgtaggcgtggacttccccttcgccgcccgttgagcaaccgcaagttggacagcagcctgtggctcagcagctggacagcgacatgaacttaagcgagctgcccggggagtttattaatatcactgatgagcgtttggctcgacaggaaaccgtgtggaatataacacctaagaatatgtctgttacccatgatatgatgctttttaaggccagccggggagaaaggactgtgtactctgtgtgttgggagggaggtggcaggttgaatactagggttctgtgagtttgattaaggtacggtgatcaatataagctatgtggtggtggggctatactactgaatgaaaaatgacttgaaattttctgcaattgaaaaataaacacgttgaaacataacatgcaacaggttcacgattctttattcctgggcaatgtaggagaaggtgtaagagttggtagcaaaagtttcagtggtgtattttccactttcccaggaccatgtaaaagacatagagtaagtgcttacctcgctagtttctgtggattcactagaatcgatgtaggatgttgcccctcctgacgcggtaggagaaggggagggtgccctgcatgtctgccgctgctcttgctcttgccgctgctgaggaggggggcgcatctgccgcagcaccggatgcatctgggaaaagcaaaaaaggggctcgtccctgtttccggaggaatttgcaagcggggtcttgcatgacggggaggcaaacccccgttcgccgcagtccggccggcccgagactcgaaccgggggtcctgcgactcaacccttggaaaataaccctccggctacagggagcgagccacttaatgctttcgctttccagcctaaccgcttacgccgcgcgcggccagtggccaaaaaagctagcgcagcagccgccgcgcctggaaggaagccaaaaggagcgctcccccgttgtctgacgtcgcacacctgggttcgacacgcgggcggtaaccgcatggatcacggcggacggccggatccggggttcgaaccccggtcgtccgccatgatacccttgcgaatttatccaccagaccacggaagagtgcccgcttacaggctctccttttgcacggtctagagcgtcaacgactgcgcacgcctcaccggccagagcgtcccgaccatggagcactttttgccgctgcgcaacatctggaaccgcgtccgcgactttccgcgcgcctccaccaccgccgccggcatcacctggatgtccaggtacatctacggattacgtcgacgtttaaaccatatgatcagctcactcaaaggcggtaatacggttatccacagaatcaggggataacgcaggaaagaacatgtgagcaaaaggccagcaaaaggccaggaaccgtaaaaaggccgcgttgctggcgtttttccataggctccgcccccctgacgagcatcacaaaaatcgacgctcaagtcagaggtggcgaaacccgacaggactataaagataccaggcgtttccccctggaagctccctcgtgcgctctcctgttccgaccctgccgcttaccggatacctgtccgcctttctcccttcgggaagcgtggcgctttctcatagctcacgctgtaggtatctcagttcggtgtaggtcgttcgctccaagctgggctgtgtgcacgaaccccccgttcagcccgaccgctgcgccttatccggtaactatcgtcttgagtccaacccggtaagacacgacttatcgccactggcagcagccactggtaacaggattagcagagcgaggtatgtaggcggtgctacagagttcttgaagtggtggcctaactacggctacactagaagaacagtatttggtatctgcgctctgctgaagccagttaccttcggaaaaagagttggtagctcttgatccggcaaacaaaccaccgctggtagcggtggtttttttgtttgcaagcagcagattacgcgcagaaaaaaaggatctcaagaagatcctttgatcttttctacggggtctgacgctcagtggaacgaaaactcacgttaagggattttggtcatgagattatcaaaaaggatcttcacctagatccttttaaattaaaaatgaagttttaaatcaatctaaagtatatatgagtaaacttggtctgacagttagaaaaactcatcgagcatcaaatgaaactgcaatttattcatatcaggattatcaataccatatttttgaaaaagccgtttctgtaatgaaggagaaaactcaccgaggcagttccataggatggcaagatcctggtatcggtctgcgattccgactcgtccaacatcaatacaacctattaatttcccctcgtcaaaaataaggttatcaagtgagaaatcaccatgagtgacgactgaatccggtgagaatggcaaaagtttatgcatttctttccagacttgttcaacaggccagccattacgctcgtcatcaaaatcactcgcatcaaccaaaccgttattcattcgtgattgcgcctgagcgagacgaaatacgcgatcgctgttaaaaggacaattacaaacaggaatcgaatgcaaccggcgcaggaacactgccagcgcatcaacaatattttcacctgaatcaggatattcttctaatacctggaatgctgttttcccagggatcgcagtggtgagtaaccatgcatcatcaggagtacggataaaatgcttgatggtcggaagaggcataaattccgtcagccagtttagtctgaccatctcatctgtaacatcattggcaacgctacctttgccatgtttcagaaacaactctggcgcatcgggcttcccatacaatcgatagattgtcgcacctgattgcccgacattatcgcgagcccatttatacccatataaatcagcatccatgttggaatttaatcgcggcctagagcaagacgtttcccgttgaatatggctcatactcttcctttttcaatattattgaagcatttatcagggttattgtctcatgagcggatacatatttgaatgtatttagaaaaataaacaaataggggttccgcgcacatttccccgaaaagtgccacctgacgtctaagaaaccattattatcatgacattaacctataaaaataggcgtatcacgaggccctttcgtctcgcgcgtttcggtgatgacggtgaaaacctctgacacatgcagctcccggagacggtcacagcttgtctgtaagcggatgccgggagcagacaacaacgtcaaagggcgaaaaaccgtctatcagggcgatggcccactacgtgaaccatcaccctaatcaagttttttggggtcgaggtgccgtaaagcactaaatcggaaccctaaagggagcccccgatttagagcttgacggggaaagccggcgaacgtggcgagaaaggaagggaagaaagcgaaaggagcgggcgctagggcgctggcaagtgtagcggtcacgctgcgcgtaaccaccacacccgccgcgcttaatgcgccgctacagggcgcgatggatcc

SEQ ID NO: 93 - DNA, 4443 bp, Artificial Sequence
  CFTR
atgcagagaagccccctggagaaggcctctgtggtgagcaagctgttcttcagctggaccagacccatcctgagaaagggctacagacagagactggagctgtctgacatctaccagatcccctctgtggactctgctgacaacctgtctgagaagctggagagagagtgggacagagagctggccagcaagaagaaccccaagctgatcaatgccctgagaagatgcttcttctggagattcatgttctatggcatcttcctgtacctgggggaggtgaccaaggctgtgcagcccctgctgctgggcagaatcattgccagctatgaccctgacaacaaggaggagagaagcattgccatctacctgggcattggcctgtgcctgctgttcattgtgagaaccctgctgctgcaccctgccatctttggcctgcaccacattggcatgcagatgagaattgccatgttcagcctgatctacaagaagaccctgaagctgagcagcagagtgctggacaagatcagcattggccagctggtgagcctgctgagcaacaacctgaacaagtttgatgagggcctggccctggcccactttgtgtggattgcccccctgcaggtggccctgctgatgggcctgatctgggagctgctgcaggcctctgccttctgtggcctgggcttcctgattgtgctggccctgttccaggctggcctgggcagaatgatgatgaagtacagagaccagagagctggcaagatctctgagagactggtgatcacctctgagatgattgagaacatccagtctgtgaaggcctactgctgggaggaggccatggagaagatgattgagaacctgagacagacagagctgaagctgaccagaaaggctgcctatgtgagatacttcaacagctctgccttcttcttctctggcttctttgtggtgttcctgtctgtgctgccctatgccctgatcaagggcatcatcctgagaaagatcttcaccaccatcagcttctgcattgtgctgagaatggctgtgaccagacagttcccctgggctgtgcagacctggtatgacagcctgggggccatcaacaagatccaggacttcctgcagaagcaggagtacaagaccctggagtacaacctgaccaccacagaggtggtgatggagaatgtgacagccttctgggaggagggctttggggagctgtttgagaaggccaagcagaacaacaacaacagaaagaccagcaatggggatgacagcctgttcttcagcaacttcagcctgctgggcacccctgtgctgaaggacatcaacttcaagattgagagaggccagctgctggctgtggctggcagcacaggggctggcaagaccagcctgctgatgatgatcatgggggagctggagccctctgagggcaagatcaagcactctggcagaatcagcttctgcagccagttcagctggatcatgcctggcaccatcaaggagaacatcatctttggggtgagctatgatgagtacagatacagatctgtgatcaaggcctgccagctggaggaggacatcagcaagtttgctgagaaggacaacattgtgctgggggaggggggcatcaccctgtctgggggccagagagccagaatcagcctggccagagctgtgtacaaggatgctgacctgtacctgctggacagcccctttggctacctggatgtgctgacagagaaggagatctttgagagctgtgtgtgcaagctgatggccaacaagaccagaatcctggtgaccagcaagatggagcacctgaagaaggctgacaagatcctgatcctgcatgagggcagcagctacttctatggcaccttctctgagctgcagaacctgcagcctgacttcagcagcaagctgatgggctgtgacagctttgaccagttctctgctgagagaagaaacagcatcctgacagagaccctgcacagattcagcctggagggggatgcccctgtgagctggacagagaccaagaagcagagcttcaagcagacaggggagtttggggagaagagaaagaacagcatcctgaaccccatcaacagcatcagaaagttcagcattgtgcagaagacccccctgcagatgaatggcattgaggaggactctgatgagcccctggagagaagactgagcctggtgcctgactctgagcagggggaggccatcctgcccagaatctctgtgatcagcacaggccccaccctgcaggccagaagaagacagtctgtgctgaacctgatgacccactctgtgaaccagggccagaacatccacagaaagaccacagccagcaccagaaaggtgagcctggccccccaggccaacctgacagagctggacatctacagcagaagactgagccaggagacaggcctggagatctctgaggagatcaatgaggaggacctgaaggagtgcttctttgatgacatggagagcatccctgctgtgaccacctggaacacctacctgagatacatcacagtgcacaagagcctgatctttgtgctgatctggtgcctggtgatcttcctggctgaggtggctgccagcctggtggtgctgtggctgctgggcaacacccccctgcaggacaagggcaacagcacccacagcagaaacaacagctatgctgtgatcatcaccagcaccagcagctactatgtgttctacatctatgtgggggtggctgacaccctgctggccatgggcttcttcagaggcctgcccctggtgcacaccctgatcacagtgagcaagatcctgcaccacaagatgctgcactctgtgctgcaggcccccatgagcaccctgaacaccctgaaggctgggggcatcctgaacagattcagcaaggacattgccatcctggatgacctgctgcccctgaccatctttgacttcatccagctgctgctgattgtgattggggccattgctgtggtggctgtgctgcagccctacatctttgtggccacagtgcctgtgattgtggccttcatcatgctgagagcctacttcctgcagaccagccagcagctgaagcagctggagtctgagggcagaagccccatcttcacccacctggtgaccagcctgaagggcctgtggaccctgagagcctttggcagacagccctactttgagaccctgttccacaaggccctgaacctgcacacagccaactggttcctgtacctgagcaccctgagatggttccagatgagaattgagatgatctttgtgatcttcttcattgctgtgaccttcatcagcatcctgaccacaggggagggggagggcagagtgggcatcatcctgaccctggccatgaacatcatgagcaccctgcagtgggctgtgaacagcagcattgatgtggacagcctgatgagatctgtgagcagagtgttcaagttcattgacatgcccacagagggcaagcccaccaagagcaccaagccctacaagaatggccagctgagcaaggtgatgatcattgagaacagccatgtgaagaaggatgacatctggccctctgggggccagatgacagtgaaggacctgacagccaagtacacagaggggggcaatgccatcctggagaacatcagcttcagcatcagccctggccagagagtgggcctgctgggcagaacaggctctggcaagagcaccctgctgtctgccttcctgagactgctgaacacagagggggagatccagattgatggggtgagctgggacagcatcaccctgcagcagtggagaaaggcctttggggtgatcccccagaaggtgttcatcttctctggcaccttcagaaagaacctggacccctatgagcagtggtctgaccaggagatctggaaggtggctgatgaggtgggcctgagatctgtgattgagcagttccctggcaagctggactttgtgctggtggatgggggctgtgtgctgagccatggccacaagcagctgatgtgcctggccagatctgtgctgagcaaggccaagatcctgctgctggatgagccctctgcccacctggaccctgtgacctaccagatcatcagaagaaccctgaagcaggcctttgctgactgcacagtgatcctgtgtgagcacagaattgaggccatgctggagtgccagcagttcctggtgattgaggagaacaaggtgagacagtatgacagcatccagaagctgctgaatgagagaagcctgttcagacaggccatcagcccctctgacagagtgaagctgttcccccacagaaacagcagcaagtgcaagagcaagccccagattgctgccctgaaggaggagaccgaggaggaggtgcaggacaccagactgtaa

SEQ ID NO: 94 - protein, 1480 aa, Artificial Sequence
  CFTR protein
MQRSPLEKASVVSKLFFSWTRPILRKGYRQRLELSDIYQIPSVDSADNLSEKLEREWDRELASKKNPKLINALRRCFFWRFMFYGIFLYLGEVTKAVQPLLLGRIIASYDPDNKEERSIAIYLGIGLCLLFIVRTLLLHPAIFGLHHIGMQMRIAMFSLIYKKTLKLSSRVLDKISIGQLVSLLSNNLNKFDEGLALAHFVWIAPLQVALLMGLIWELLQASAFCGLGFLIVLALFQAGLGRMMMKYRDQRAGKISERLVITSEMIENIQSVKAYCWEEAMEKMIENLRQTELKLTRKAAYVRYFNSSAFFFSGFFVVFLSVLPYALIKGIILRKIFTTISFCIVLRMAVTRQFPWAVQTWYDSLGAINKIQDFLQKQEYKTLEYNLTTTEVVMENVTAFWEEGFGELFEKAKQNNNNRKTSNGDDSLFFSNFSLLGTPVLKDINFKIERGQLLAVAGSTGAGKTSLLMMIMGELEPSEGKIKHSGRISFCSQFSWIMPGTIKENIIFGVSYDEYRYRSVIKACQLEEDISKFAEKDNIVLGEGGITLSGGQRARISLARAVYKDADLYLLDSPFGYLDVLTEKEIFESCVCKLMANKTRILVTSKMEHLKKADKILILHEGSSYFYGTFSELQNLQPDFSSKLMGCDSFDQFSAERRNSILTETLHRFSLEGDAPVSWTETKKQSFKQTGEFGEKRKNSILNPINSIRKFSIVQKTPLQMNGIEEDSDEPLERRLSLVPDSEQGEAILPRISVISTGPTLQARRRQSVLNLMTHSVNQGQNIHRKTTASTRKVSLAPQANLTELDIYSRRLSQETGLEISEEINEEDLKECFFDDMESIPAVTTWNTYLRYITVHKSLIFVLIWCLVIFLAEVAASLVVLWLLGNTPLQDKGNSTHSRNNSYAVIITSTSSYYVFYIYVGVADTLLAMGFFRGLPLVHTLITVSKILHHKMLHSVLQAPMSTLNTLKAGGILNRFSKDIAILDDLLPLTIFDFIQLLLIVIGAIAVVAVLQPYIFVATVPVIVAFIMLRAYFLQTSQQLKQLESEGRSPIFTHLVTSLKGLWTLRAFGRQPYFETLFHKALNLHTANWFLYLSTLRWFQMRIEMIFVIFFIAVTFISILTTGEGEGRVGIILTLAMNIMSTLQWAVNSSIDVDSLMRSVSRVFKFIDMPTEGKPTKSTKPYKNGQLSKVMIIENSHVKKDDIWPSGGQMTVKDLTAKYTEGGNAILENISFSISPGQRVGLLGRTGSGKSTLLSAFLRLLNTEGEIQIDGVSWDSITLQQWRKAFGVIPQKVFIFSGTFRKNLDPYEQWSDQEIWKVADEVGLRSVIEQFPGKLDFVLVDGGCVLSHGHKQLMCLARSVLSKAKILLLDEPSAHLDPVTYQIIRRTLKQAFADCTVILCEHRIEAMLECQQFLVIEENKVRQYDSIQKLLNERSLFRQAISPSDRVKLFPHRNSSKCKSKPQIAALKEETEEEVQDTRL

SEQ ID NO: 95 - protein, 1428 aa, Artificial Sequence
  CFTRdeltaR protein
MQRSPLEKASVVSKLFFSWTRPILRKGYRQRLELSDIYQIPSVDSADNLSEKLEREWDRELASKKNPKLINALRRCFFWRFMFYGIFLYLGEVTKAVQPLLLGRIIASYDPDNKEERSIAIYLGIGLCLLFIVRTLLLHPAIFGLHHIGMQMRIAMFSLIYKKTLKLSSRVLDKISIGQLVSLLSNNLNKFDEGLALAHFVWIAPLQVALLMGLIWELLQASAFCGLGFLIVLALFQAGLGRMMMKYRDQRAGKISERLVITSEMIENIQSVKAYCWEEAMEKMIENLRQTELKLTRKAAYVRYFNSSAFFFSGFFVVFLSVLPYALIKGIILRKIFTTISFCIVLRMAVTRQFPWAVQTWYDSLGAINKIQDFLQKQEYKTLEYNLTTTEVVMENVTAFWEEGFGELFEKAKQNNNNRKTSNGDDSLFFSNFSLLGTPVLKDINFKIERGQLLAVAGSTGAGKTSLLMMIMGELEPSEGKIKHSGRISFCSQFSWIMPGTIKENIIFGVSYDEYRYRSVIKACQLEEDISKFAEKDNIVLGEGGITLSGGQRARISLARAVYKDADLYLLDSPFGYLDVLTEKEIFESCVCKLMANKTRILVTSKMEHLKKADKILILHEGSSYFYGTFSELQNLQPDFSSKLMGCDSFDQFSAERRNSILTETLHRFSLEGDAPVSWTETKKQSFKQTGEFGEKRKNSILNPINSTLQARRRQSVLNLMTHSVNQGQNIHRKTTASTRKVSLAPQANLTELDIYSRRLSQETGLEISEEINEEDLKECFFDDMESIPAVTTWNTYLRYITVHKSLIFVLIWCLVIFLAEVAASLVVLWLLGNTPLQDKGNSTHSRNNSYAVIITSTSSYYVFYIYVGVADTLLAMGFFRGLPLVHTLITVSKILHHKMLHSVLQAPMSTLNTLKAGGILNRFSKDIAILDDLLPLTIFDFIQLLLIVIGAIAVVAVLQPYIFVATVPVIVAFIMLRAYFLQTSQQLKQLESEGRSPIFTHLVTSLKGLWTLRAFGRQPYFETLFHKALNLHTANWFLYLSTLRWFQMRIEMIFVIFFIAVTFISILTTGEGEGRVGIILTLAMNIMSTLQWAVNSSIDVDSLMRSVSRVFKFIDMPTEGKPTKSTKPYKNGQLSKVMIIENSHVKKDDIWPSGGQMTVKDLTAKYTEGGNAILENISFSISPGQRVGLLGRTGSGKSTLLSAFLRLLNTEGEIQIDGVSWDSITLQQWRKAFGVIPQKVFIFSGTFRKNLDPYEQWSDQEIWKVADEVGLRSVIEQFPGKLDFVLVDGGCVLSHGHKQLMCLARSVLSKAKILLLDEPSAHLDPVTYQIIRRTLKQAFADCTVILCEHRIEAMLECQQFLVIEENKVRQYDSIQKLLNERSLFRQAISPSDRVKLFPHRNSSKCKSKPQIAALKEETEEEVQDTRL

SEQ ID NO: 96 - DNA, 250 bp, Artificial Sequence
  Mouse U1a promoter sequence
atggaggcggtactatgtagatgagaattcaggagcaaactgggaaaagcaactgcttccaaatatttgtgatttttacagtgtagttttggaaaaactcttagcctaccaattcttctaagtgttttaaaatgtgggagccagtacacatgaagttatagagtgttttaatgaggcttaaatatttaccgtaactatgaaatgctacgcatatcatgctgttcaggctccgtggccacgcaactcatac

SEQ ID NO: 97 - DNA, 101 bp, Artificial Sequence
  Polymerase III H1 mutant promoter sequence
aatatttgcatgtcgctatgtgttctgggaaatcaccataaacgtgaaatgtctttggatttgggaatcttcgaagttctgtatgagaccacagatctcca

SEQ ID NO: 98 - DNA, 2214 bp, Artificial Sequence
  AAV110 DNA
atggctgccgatggttatcttccagattggctcgaggacaacctctctgagggcattcgcgagtggtgggacttgaaacctggagccccgaaacccaaagccaaccagcaaaagcaggacgacggccggggtctggtgcttcctggctacaagtacctcggacccttcaacggactcgacaagggggagcccgtcaacgcggcggatgcagcggccctcgagcacgacaaggcctacgaccagcagctcaaagcgggtgacaatccgtacctgcggtataaccacgccgacgccgagtttcaggagcgtctgcaagaagatacgtcttttgggggcaacctcgggcgagcagtcttccaggccaagaagcgggttctcgaacctctcggtctggttgaggaaggcgctaagacggctcctggaaagaagagaccggtagagccatcaccccagcgttctccagactcctctacgggcatcggcaagaaaggccaacagcccgccagaaaaagactcaattttggtcagactggcgactcagagtcagtccccgacccacaacctctcggagaacctccagcaacccccgctgctgtgggacctactacaatggcttcaggcggtggcgcaccaatggcagacaataacgaaggcgccgacggagtgggtaatgcctcaggaaattggcattgcgattccacatggctgggcgacagagtcatcaccaccagcacccgaacatgggccttgcccacctataacaaccacctctacaagcaaatctccagtgcttcaacgggggccagcaacgacaaccactacttcggctacagcaccccctgggggtattttgatttcaacagattccactgccatttctcaccacgtgactggcagcgactcatcaacaacaattggggattccggcccaagagactcaacttcaagctcttcaacatccaagtcaaggaggtcacgacgaatgatggcgtcacgaccatcgctaataaccttaccagcacggttcaagtcttctcggactcggagtaccagttgccgtacgtcctcggctctgcgcaccagggctgcctccctccgttcccggcggacgtgttcatgattccgcagtacggctacctaacgctcaacaatggcagccaggcagtgggacggtcatccttttactgcctggaatatttcccatcgcagatgctgagaacgggcaataactttaccttcagctacaccttcgaggacgtgcctttccacagcagctacgcgcacagccagagcctggaccggctgatgaatcctctcatcgaccagtacctgtattacctgaacagaactcagaatcagtccggaagtgcccaaaacaaggacttgctgtttagccgggggtctccagctggcatgtctgttcagcccaaaaactggctacctggaccctgttaccggcagcagcgcgtttctaaaacaaaaacagacaacaacaacagcaactttacctggactggtgcttcaaaatataaccttaatgggcgtgaatctataatcaaccctggcactgctatggcctcacacaaagacgacaaagacaagttctttcccatgagcggtgtcatgatttttggaaaggagagcgccggagcttcaaacactgcattggacaatgtcatgatcacagacgaagaggaaatcaaagccactaaccccgtggccaccgaaagatttgggactgtggcagtcaatctccagagcagcagcacagaccctgcgaccggagatgtgcatgttatgggagccttacctggaatggtgtggcaagacagagacgtatacctgcagggtcctatttgggccaaaattcctcacacggatggacactttcacccgtctcctctcatgggcggctttggacttaagcacccgcctcctcagatcctcatcaaaaacacgcctgttcctgcgaatcctccggcagagttttcggctacaaagtttgcttcattcatcacccagtattccacaggacaagtgagcgtggagattgaatgggagctgcagaaagaaaacagcaaacgctggaatcccgaagtgcagtatacatctaactatgcaaaatctgccaacgttgatttcactgtggacaacaatggactttatactgagcctcgccccattggcacccgttacctcacccgtcccctgtaa

SEQ ID NO: 99 - DNA, 1509 bp, Homo sapiens
  misc_feature (1)..(1509): Sulfoglucosamine sulfohydrolase (SGSH)
atgagctgccccgtgcccgcctgctgcgcgctgctgctagtcctggggctctgccgggcgcgtccccggaacgcactgctgctcctcgcggatgacggaggctttgagagtggcgcgtacaacaacagcgccatcgccaccccgcacctggacgccttggcccgccgcagcctcctctttcgcaatgccttcacctcggtcagcagctgctctcccagccgcgccagcctcctcactggcctgccccagcatcagaatgggatgtacgggctgcaccaggacgtgcaccacttcaactccttcgacaaggtgcggagcctgccgctgctgctcagccaagctggtgtgcgcacaggcatcatcgggaagaagcacgtggggccggagaccgtgtacccgtttgactttgcgtacacggaggagaatggctccgtcctccaggtggggcggaacatcactagaattaagctgctcgtccggaaattcctgcagactcaggatgaccagcctttcttcctctacgtcgccttccacgacccccaccgctgtgggcactcccagccccagtacggaaccttctgtgagaagtttggcaacggagagagcggcatgggtcgtatcccagactggaccccccaggcctacgacccactggacgtgctggtgccttacttcgtccccaacaccccggcagcccgagccgacctggccgctcagtacaccaccgtcggccgcatggaccaaggagttggactggtgctccaggagctgcgtgacgccggtgtcctgaacgacacactggtgatcttcacgtccgacaacgggatccccttccccagcggcaggaccaacctgtactggccgggcactgctgaacccttactggtgtcatccccggagcacccaaaacgctggggccaagtcagcgaggcctacgtgagcctcctagacctcacgcccaccatcttggattggttctcgatcccgtaccccagctacgccatctttggctcgaagaccatccacctcactggccggtccctcctgccggcgctggaggccgagcccctctgggccaccgtctttggcagccagagccaccacgaggtcaccatgtcctaccccatgcgctccgtgcagcaccggcacttccgcctcgtgcacaacctcaacttcaagatgccctttcccatcgaccaggacttctacgtctcacccaccttccaggacctcctgaaccgcaccacagctggtcagcccacgggctggtacaaggacctccgtcattactactaccgggcgcgctgggagctctacgaccggagccgggacccccacgagacccagaacctggccaccgacccgcgctttgctcagcttctggagatgcttcgggaccagctggccaagtggcagtgggagacccacgacccctgggtgtgcgcccccgacggcgtcctggaggagaagctctctccccagtgccagcccctccacaatgagctgtga

SEQ ID NO: 100 - DNA, 1509 bp, Artificial Sequence
  Codon optimized CO1-SGSH
atgagctgtcctgttccagcctgttgtgccctgctgctggttctgggactgtgcagagccagacctaggaacgctctgctgctgctcgctgacgatggcggatttgagagcggcgcctacaacaacagcgccattgccacacctcacctggatgccctggccagaagaagcctgctgttcagaaacgccttcaccagcgtgtccagctgcagcccttctagagctagcctgctgacaggactgccccagcaccagaatgggatgtatggcctgcaccaggacgtgcaccacttcaacagcttcgacaaagtgcggagcctgcctctgcttctgtctcaagccggcgtcagaacaggcatcatcggcaagaaacacgtgggccccgagacagtgtaccccttcgatttcgcctacaccgaagagaacggcagcgtgctgcaagtgggcagaaacatcacccggatcaagctgctcgtgcggaagttcctgcagacccaggacgaccagcctttcttcctgtacgtggccttccacgatcctcacagatgcggccatagccagcctcagtacggcaccttctgcgagaagtttggcaacggcgagagcggcatgggcagaatccctgattggacccctcaggcctacgatcccctggatgtgctggtgccttacttcgtgcctaacacaccagccgccagagccgatctggccgctcagtatacaaccgtgggaagaatggaccaaggcgtcggcctggttctgcaagagcttagagatgccggcgtgctgaacgacaccctggtcatctttaccagcgacaacggcatcccctttccatctggccggaccaatctgtactggcctggaacagctgagcccctgctggtgtctagccctgagcaccctaagagatggggccaagtgtctgaggcctacgtgtccctgctggatctgacccctaccatcctggactggttcagcatcccctatcctagctacgccatcttcggcagcaagaccatccacctgaccggcagatctctgctgccagctctggaagctgaacctctgtgggccacagtgtttggcagccagtctcaccacgaagtgacaatgagctaccccatgcggagcgtgcagcacagacacttcagactggtgcacaacctgaacttcaagatgccctttccaatcgaccaggacttctatgtgtccccaaccttccaggacctgctgaacagaaccacagccggccaacctaccggctggtacaaggacctgcggcactactactatagagccagatgggagctgtacgaccggtccagagatccccacgagacacagaacctggccaccgatcctagattcgcccagctgctggaaatgctgagagatcagctggccaagtggcagtgggagacacacgatccttgggtctgcgctcctgatggcgtgctggaagagaagctgtcccctcagtgtcagcccctgcacaacgagctttaa

SEQ ID NO: 101 - DNA, 1596 bp, Artificial Sequence
  Codon optimized + GET CO1-SGSH-GET
atgagctgtcctgttccagcctgttgtgccctgctgctggttctgggactgtgcagagccagacctaggaacgctctgctgctgctcgctgacgatggcggatttgagagcggcgcctacaacaacagcgccattgccacacctcacctggatgccctggccagaagaagcctgctgttcagaaacgccttcaccagcgtgtccagctgcagcccttctagagctagcctgctgacaggactgccccagcaccagaatgggatgtatggcctgcaccaggacgtgcaccacttcaacagcttcgacaaagtgcggagcctgcctctgcttctgtctcaagccggcgtcagaacaggcatcatcggcaagaaacacgtgggccccgagacagtgtaccccttcgatttcgcctacaccgaagagaacggcagcgtgctgcaagtgggcagaaacatcacccggatcaagctgctcgtgcggaagttcctgcagacccaggacgaccagcctttcttcctgtacgtggccttccacgatcctcacagatgcggccatagccagcctcagtacggcaccttctgcgagaagtttggcaacggcgagagcggcatgggcagaatccctgattggacccctcaggcctacgatcccctggatgtgctggtgccttacttcgtgcctaacacaccagccgccagagccgatctggccgctcagtatacaaccgtgggaagaatggaccaaggcgtcggcctggttctgcaagagcttagagatgccggcgtgctgaacgacaccctggtcatctttaccagcgacaacggcatcccctttccatctggccggaccaatctgtactggcctggaacagctgagcccctgctggtgtctagccctgagcaccctaagagatggggccaagtgtctgaggcctacgtgtccctgctggatctgacccctaccatcctggactggttcagcatcccctatcctagctacgccatcttcggcagcaagaccatccacctgaccggcagatctctgctgccagctctggaagctgaacctctgtgggccacagtgtttggcagccagtctcaccacgaagtgacaatgagctaccccatgcggagcgtgcagcacagacacttcagactggtgcacaacctgaacttcaagatgccctttccaatcgaccaggacttctatgtgtccccaaccttccaggacctgctgaacagaaccacagccggccaacctaccggctggtacaaggacctgcggcactactactatagagccagatgggagctgtacgaccggtccagagatccccacgagacacagaacctggccaccgatcctagattcgcccagctgctggaaatgctgagagatcagctggccaagtggcagtgggagacacacgatccttgggtctgcgctcctgatggcgtgctggaagagaagctgtcccctcagtgtcagcccctgcacaacgagctgcggcgtcgtcggcgaagaagaagaaagcgcaagaaaaaaggcaaaggcctgggcaagaagcgggacccctgtctgagaaagtacaaataa

SEQ ID NO: 102 - DNA, 1509 bp, Artificial Sequence
  Codon optimized CO2-SGSH
atgagctgccctgtgcctgcctgctgtgccctgctgctggtgctgggcctgtgcagagccagacctaggaatgccctgctgctgctggctgatgatgggggctttgagagtggggcctacaacaacagtgccattgccaccccccacctggatgccctggccagaagaagcctgctgttcagaaatgccttcaccagtgtgagcagctgcagccccagcagagccagcctgctgacaggcctgccccagcaccagaatggcatgtatggcctgcaccaggatgtgcaccacttcaacagctttgacaaggtgagaagcctgcccctgctgctgagccaggctggggtgagaacaggcatcattggcaagaagcatgtgggccctgagacagtgtacccctttgactttgcctacacagaggagaatggcagtgtgctgcaggtgggcagaaacatcaccagaatcaagctgctggtgagaaagttcctgcagacccaggatgaccagcccttcttcctgtatgtggccttccatgacccccacagatgtggccacagccagccccagtatggcaccttctgtgagaagtttggcaatggggagagtggcatgggcagaatccctgactggaccccccaggcctatgaccccctggatgtgctggtgccctactttgtgcccaacacccctgctgccagagctgacctggctgcccagtacaccacagtgggcagaatggaccagggggtgggcctggtgctgcaggagctgagagatgctggggtgctgaatgacaccctggtgatcttcaccagtgacaatggcatccccttccccagtggcagaaccaacctgtactggcctggcacagctgagcccctgctggtgagcagccctgagcaccccaagagatggggccaggtgagtgaggcctatgtgagcctgctggacctgacccccaccatcctggactggttcagcatcccctaccccagctatgccatctttggcagcaagaccatccacctgacaggcagaagcctgctgcctgccctggaggctgagcccctgtgggccacagtgtttggcagccagagccaccatgaggtgaccatgagctaccccatgagaagtgtgcagcacagacacttcagactggtgcacaacctgaacttcaagatgcccttccccattgaccaggacttctatgtgagccccaccttccaggacctgctgaacagaaccacagctggccagcccacaggctggtacaaggacctgagacactactactacagagccagatgggagctgtatgacagaagcagagacccccatgagacccagaacctggccacagaccccagatttgcccagctgctggagatgctgagagaccagctggccaagtggcagtgggagacccatgacccctgggtgtgtgcccctgatggggtgctggaggagaagctgagcccccagtgccagcccctgcacaatgagctgtga

SEQ ID NO: 103 - DNA, 921 bp, Artificial Sequence
  Codon optimized Ceroid Lipofuscinosis, Neuronal, 1 (CLN1)
atggcttctccggggtgtctgtggctgctggcagtggcactccttccctggacttgcgccagccgggctctgcagcacctcgaccctccagcccctcttccactggtgatttggcacggaatgggtgattcctgctgtaatcccctgtcaatgggagccatcaagaagatggtggagaagaagatccctggaatctacgtgctgtcactggagattggaaagaccctgatggaggacgtcgagaactccttcttcctcaatgtcaactctcaagtgaccaccgtctgccaggccctggccaaggacccgaagctgcagcaggggtataatgctatggggttcagccagggaggacagttccttcgggctgtggcccaacgctgccctagcccacccatgatcaacctgatctcagtgggtggccagcatcagggcgtgttcggacttccccggtgtcccggggaatcctctcatatctgcgacttcatccgcaaaactctcaatgcaggcgcttattcaaaggtcgtccaagagaggctggtgcaagccgagtactggcacgatcccattaaggaggacgtgtacagaaatcactcaatctttctggccgacattaaccaggagaggggaattaacgaatcatataagaagaatctcatggccctcaaaaagttcgtcatggtgaagttccttaacgatagcattgtggacccagtggacagcgaatggttcggattttaccgctcaggccaggcaaaagaaaccatccctctccaagagacttctctttacacccaagacagacttgggcttaaggaaatggataacgctggtcagctggtgttcctcgccaccgaaggtgaccatctgcagctcagcgaagagtggttctacgctcatatcatcccgtttcttggttga

SEQ ID NO: 104 - DNA, 885 bp, Homo sapiens
  misc_feature (1)..(885): Survival Motor Neuron 1 (SMN1)
atggcgatgagcagcggcggcagtggtggcggcgtcccggagcaggaggattccgtgctgttccggcgcggcacaggccagagcgatgattctgacatttgggatgatacagcactgataaaagcatatgataaagctgtggcttcatttaagcatgctctaaagaatggtgacatttgtgaaacttcgggtaaaccaaaaaccacacctaaaagaaaacctgctaagaagaataaaagccaaaagaagaatactgcagcttccttacaacagtggaaagttggggacaaatgttctgccatttggtcagaagacggttgcatttacccagctaccattgcttcaattgattttaagagagaaacctgtgttgtggtttacactggatatggaaatagagaggagcaaaatctgtccgatctactttccccaatctgtgaagtagctaataatatagaacagaatgctcaagagaatgaaaatgaaagccaagtttcaacagatgaaagtgagaactccaggtctcctggaaataaatcagataacatcaagcccaaatctgctccatggaactcttttctccctccaccaccccccatgccagggccaagactgggaccaggaaagccaggtctaaaattcaatggcccaccaccgccaccgccaccaccaccaccccacttactatcatgctggctgcctccatttccttctggaccaccaataattcccccaccacctcccatatgtccagattctcttgatgatgctgatgctttgggaagtatgttaatttcatggtacatgagtggctatcatactggctattatatgggttttagacaaaatcaaaaagaaggaaggtgctcacattccttaaattaa

SEQ ID NO: 105 - DNA, 885 bp, Artificial Sequence
  Codon optimized CO1-SMN1
atggcgatgtctagtggtggatctggtggcggcgtgcccgagcaagaagatagcgtcctgttcagaagaggcaccggccagagcgacgacagcgacatctgggatgatacagccctgatcaaggcctacgacaaggccgtggccagctttaagcacgccctgaagaacggcgatatctgcgagacaagcggcaagcccaagaccacacctaagagaaagcccgccaagaagaacaagagccagaagaagaataccgccgccagcctgcagcagtggaaagtgggcgataagtgcagcgccatttggagcgaggacggctgtatctaccctgccacaatcgccagcatcgacttcaagcgggaaacctgcgtggtggtgtacacaggctacggcaacagagaggaacagaacctgagcgacctgctgtccccaatttgcgaggtggccaacaacatcgagcagaacgcccaagagaacgagaacgagtcccaggtgtccaccgacgagagcgagaatagcagaagccccggcaacaagagcgacaacatcaagcctaagagcgccccttggaacagcttcctgcctcctcctccaccaatgcctggacctagactcggacctggaaagcccggcctgaagttcaatggacctccaccaccgccaccacctccgcctccacatcttctgtcttgttggctgcctccatttcctagcggccctccaatcatcccgccacctccacctatctgccccgacagtctggatgatgctgatgccctgggctccatgctgatctcttggtacatgagcggctaccacaccggctactacatgggcttcagacagaaccagaaagagggccgttgcagccacagcctgaactga

SEQ ID NO: 106 - DNA, 885 bp, Artificial Sequence
  Codon optimized CO2-SMN1
atggccatgagcagtgggggcagtggaggaggggtgcctgagcaggaggacagtgtgctgttcagaagaggcacaggccagagtgatgacagtgacatctgggatgacacagccctgatcaaggcctatgacaaggctgtggccagcttcaagcatgccctgaagaatggggacatctgtgagaccagtggcaagcccaagaccacccccaagagaaagcctgccaagaagaacaagagccagaagaagaacacagctgccagcctgcagcagtggaaggtgggagacaagtgcagtgccatctggagtgaggatggctgcatctaccctgccaccattgccagcattgacttcaagagagagacctgtgtggtggtgtacacaggctatggcaacagagaggagcagaacctgagtgacctgctgagccccatctgtgaggtggccaacaacattgagcagaatgcccaggagaatgagaatgagagccaggtgagcacagatgagagtgagaacagcagaagccctggcaacaagagtgacaacatcaagcccaagagtgccccttggaacagcttcctgccacccccaccacccatgcctggccccagactgggccctggcaagcctggcctgaagttcaatggcccaccaccccctcctccaccaccccctccccacctgctgagctgctggctgccccccttccccagtggcccacccatcatcccacctcccccacccatctgccctgacagcctggatgatgctgatgccctgggcagcatgctgatcagctggtacatgagtggctaccacacaggctactacatgggcttcagacagaaccagaaggagggcagatgcagccacagcctgaactga

SEQ ID NO: 107 - DNA, 1548 bp, Homo sapiens
  misc_feature (1)..(1548): Tissue Non-specific Alkaline Phosphatase (TNALP)
atgatttcaccattcttagtactggccattggcacctgccttactaactcactagtgccagagaaagagaaagaccccaagtactggcgagaccaagcgcaagagacactgaaatatgccctggagcttcagaagctcaacaccaacgtggctaagaatgtcatcatgttcctgggagatgggatgggtgtctccacagtgacggctgcccgcatcctcaagggtcagctccaccacaaccctggggaggagaccaggctggagatggacaagttccccttcgtggccctctccaagacgtacaacaccaatgcccaggtccctgacagcgccggcaccgccaccgcctacctgtgtggggtgaaggccaatgagggcaccgtgggggtaagcgcagccactgagcgttcccggtgcaacaccacccaggggaacgaggtcacctccatcctgcgctgggccaaggacgctgggaaatctgtgggcattgtgaccaccacgagagtgaaccatgccacccccagcgccgcctacgcccactcggctgaccgggactggtactcagacaacgagatgccccctgaggccttgagccagggctgtaaggacatcgcctaccagctcatgcataacatcagggacattgacgtgatcatggggggtggccggaaatacatgtaccccaagaataaaactgatgtggagtatgagagtgacgagaaagccaggggcacgaggctggacggcctggacctcgttgacacctggaagagcttcaaaccgagatacaagcactcccacttcatctggaaccgcacggaactcctgacccttgacccccacaatgtggactacctattgggtctcttcgagccaggggacatgcagtacgagctgaacaggaacaacgtgacggacccgtcactctccgagatggtggtggtggccatccagatcctgcggaagaaccccaaaggcttcttcttgctggtggaaggaggcagaattgaccacgggcaccatgaaggaaaagccaagcaggccctgcatgaggcggtggagatggaccgggccatcgggcaggcaggcagcttgacctcctcggaagacactctgaccgtggtcactgcggaccattcccacgtcttcacatttggtggatacaccccccgtggcaactctatctttggtctggcccccatgctgagtgacacagacaagaagcccttcactgccatcctgtatggcaatgggcctggctacaaggtggtgggcggtgaacgagagaatgtctccatggtggactatgctcacaacaactaccaggcgcagtctgctgtgcccctgcgccacgagacccacggcggggaggacgtggccgtcttctccaagggccccatggcgcacctgctgcacggcgtccacgagcagaactacgtcccccacgtgatggcgtatgcagcctgcatcggggccaacctcggccactgtgctcctgccagctcggcaggatccgatgatgacgacgacgatgacgatgatgattga

SEQ ID NO: 108 - DNA, 1548 bp, Artificial Sequence
  Codon optimized, CO1-TNALP contains D10 tag at C end
atgatctctccatttctggtgctggccatcggcacctgtctgaccaactcactagtgcccgagaaagagaaggaccccaagtactggcgcgatcaggcccaagagacactgaagtacgccctggaactgcagaaactgaacaccaacgtggccaagaacgtgatcatgttcctcggcgacggcatgggcgtgtccacagttacagccgccagaatcctgaagggccagctgcaccataatcctggcgaagagacacggctggaaatggacaagttcccattcgtggccctgagcaagacctacaacaccaatgctcaggtgcccgattctgccggaacagccacagcttatctgtgcggcgtgaaggccaatgagggcaccgttggagtgtctgccgccaccgaaagatcccggtgcaataccacacagggcaacgaagtgaccagcatcctgagatgggccaaagacgccggcaagtctgtgggcatcgtgaccaccaccagagtgaaccacgccacacctagcgccgcctatgctcactctgccgacagagactggtacagcgacaacgagatgcctcctgaggctctgtctcagggctgcaaggatatcgcctaccagctgatgcacaacatccgggacattgatgtgatcatgggcggaggccggaagtacatgtatcccaagaacaagaccgacgtcgagtacgagagcgacgagaaggccagaggcacaagactggatggcctggacctggtggatacctggaagtccttcaagccccggtacaagcacagccacttcatctggaaccggaccgagctgctgacactggaccctcacaatgtggactacctgctgggcctgttcgagcccggcgatatgcagtacgagctgaaccggaacaacgtgacagaccccagcctgagcgagatggtggttgtggccattcagatcctgcggaagaaccccaagggattcttcctgctggtggaaggcggcaggatcgatcacggacaccatgagggaaaagccaagcaggccctgcacgaggccgtcgaaatggatagagccattggccaggccggcagcctgacaagctctgaggatacactgaccgtggtcaccgccgatcacagccacgtgttcacattcggcggctacacccctagaggcaacagcatctttggactggcccctatgctgagcgacaccgacaagaagcctttcaccgccatcctgtacggcaacggccctggctataaggttgtcggaggcgagagggaaaacgtgtccatggtggattacgcccacaacaactaccaggctcagagcgccgtgcctctgagacacgaaacacacggcggagaagatgtggccgtgttcagcaagggccccatggctcatctgctgcatggcgtgcacgagcagaattacgtgccacacgtgatggcctacgccgcctgtattggagccaatctgggacattgtgcccctgccagtagcgccggatccgacgatgatgacgacgacgatgacgatgactga

SEQ ID NO: 109 - DNA, 1548 bp, Artificial Sequence
  Codon optimized, CO2-TNALP contains D10 tag at C end
atgatcagccccttcctggtgctggccattggcacctgcctgaccaacagcctggtgcctgagaaggagaaggaccccaagtactggagagaccaggcccaggagaccctgaagtatgccctggagctgcagaagctgaacaccaatgtggccaagaatgtgatcatgttcctgggggatggcatgggggtgagcacagtgacagctgccagaatcctgaagggccagctgcaccacaaccctggggaggagaccagactggagatggacaagttcccctttgtggccctgagcaagacctacaacaccaatgcccaggtgcctgacagtgctggcacagccacagcctacctgtgtggggtgaaggccaatgagggcacagtgggggtgagtgctgccacagagagaagcagatgcaacaccacccagggcaatgaggtgaccagcatcctgagatgggccaaggatgctggcaagagtgtgggcattgtgaccaccaccagagtgaaccatgccacccccagtgctgcctatgcccacagtgctgacagagactggtacagtgacaatgagatgccccctgaggccctgagccagggctgcaaggacattgcctaccagctgatgcacaacatcagagacattgatgtgatcatgggggggggcagaaagtacatgtaccccaagaacaagacagatgtggagtatgagagtgatgagaaggccagaggcaccagactggatggcctggacctggtggacacctggaagagcttcaagcccagatacaagcacagccacttcatctggaacagaacagagctgctgaccctggacccccacaatgtggactacctgctgggcctgtttgagcctggggacatgcagtatgagctgaacagaaacaatgtgacagaccccagcctgagtgagatggtggtggtggccatccagatcctgagaaagaaccccaagggcttcttcctgctggtggaggggggcagaattgaccatggccaccatgagggcaaggccaagcaggccctgcatgaggctgtggagatggacagagccattggccaggctggcagcctgaccagcagtgaggacaccctgacagtggtgacagctgaccacagccatgtgttcacctttgggggctacacccccagaggcaacagcatctttggcctggcccccatgctgagtgacacagacaagaagcccttcacagccatcctgtatggcaatggccctggctacaaggtggtggggggggagagagagaatgtgagcatggtggactatgcccacaacaactaccaggcccagagtgctgtgcccctgagacatgagacccatgggggggaggatgtggctgtgttcagcaagggccccatggcccacctgctgcatggggtgcatgagcagaactatgtgccccatgtgatggcctatgctgcctgcattggggccaacctgggccactgtgcccctgccagcagtgctggatccgatgatgatgatgatgatgatgatgatgactga

SEQ ID NO: 110 - DNA, 636 bp, Homo sapiens
  misc_feature (1)..(636): Glial Cell Derived Neurotrophic Factor (GDNF)
atgaagttatgggatgtcgtggctgtctgcctggtgctgctccacaccgcgtccgccttcccgctgcccgccggcaagaggcctcccgaggcgcccgccgaagaccgctccctcggccgccgccgcgcgcccttcgcgctgagcagtgactcaaatatgccagaggattatcctgatcagttcgatgatgtcatggattttattcaagccaccattaaaagactgaaaaggtcaccagataaacaaatggcagtgcttcctagaagagagcggaatcggcaggctgcagctgccaacccagagaattccagaggaaaaggtcggagaggccagaggggcaaaaaccggggttgtgtcttaactgcaatacatttaaatgtcactgacttgggtctgggctatgaaaccaaggaggaactgatttttaggtactgcagcggctcttgcgatgcagctgagacaacgtacgacaaaatattgaaaaacttatccagaaatagaaggctggtgagtgacaaagtagggcaggcatgttgcagacccatcgcctttgatgatgacctgtcgtttttagatgataacctggtttaccatattctaagaaagcattccgctaaaaggtgtggatgtatctaa

SEQ ID NO: 111 - DNA, 1611 bp, Homo sapiens
  misc_feature (1)..(1611): Tissue Glucosyl Ceramidase beta (GBA1)
atggagttttcaagtccttccagagaggaatgtcccaagcctttgagtagggtaagcatcatggctggcagcctcacaggattgcttctacttcaggcagtgtcgtgggcatcaggtgcccgcccctgcatccctaaaagcttcggctacagctcggtggtgtgtgtctgcaatgccacatactgtgactcctttgaccccccgacctttcctgcccttggtaccttcagccgctatgagagtacacgcagtgggcgacggatggagctgagtatggggcccatccaggctaatcacacgggcacaggcctgctactgaccctgcagccagaacagaagttccagaaagtgaagggatttggaggggccatgacagatgctgctgctctcaacatccttgccctgtcaccccctgcccaaaatttgctacttaaatcgtacttctctgaagaaggaatcggatataacatcatccgggtaccaatggccagctgtgacttctccatccgcacctacacctatgcagacacccctgatgatttccagttgcacaacttcagcctcccagaggaagataccaagctcaagatacccctgattcaccgagccctgcagttggcccagcgtcccgtttcactccttgccagcccctggacatcacccacttggctcaagaccaatggagcggtgaatgggaaggggtcactcaagggacagcccggagacatctaccaccagacctgggccagatactttgtgaagttcctggatgcctatgctgagcacaagttacagttctgggcagtgacagctgaaaatgagccttctgctgggctgttgagtggataccccttccagtgcctgggcttcacccctgaacatcagcgagacttcattgcccgtgacctaggtcctaccctcgccaacagtactcaccacaatgtccgcctactcatgctggatgaccaacgcttgctgctgccccactgggcaaaggtggtactgacagacccagaagcagctaaatatgttcatggcattgctgtacattggtacctggactttctggctccagccaaagccaccctaggggagacacaccgcctgttccccaacaccatgctctttgcctcagaggcctgtgtgggctccaagttctgggagcagagtgtgcggctaggctcctgggatcgagggatgcagtacagccacagcatcatcacgaacctcctgtaccatgtggtcggctggaccgactggaaccttgccctgaaccccgaaggaggacccaattgggtgcgtaactttgtcgacagtcccatcattgtagacatcaccaaggacacgttttacaaacagcccatgttctaccaccttggccacttcagcaagttcattcctgagggctcccagagagtggggctggttgccagtcagaagaacgacctggacgcagtggcactgatgcatcccgatggctctgctgttgtggtcgtgctaaaccgctcctctaaggatgtgcctcttaccatcaaggatcctgctgtgggcttcctggagacaatctcacctggctactccattcacacctacctgtggcgtcgccagtga

SEQ ID NO: 112 - DNA, 1611 bp, Artificial Sequence
  Codon optimized CO1-GBA1
atggagttcagcagccccagcagagaggagtgccccaagcccctgagcagagtgagcatcatggctggcagcctgacaggcctgctgctgctgcaggctgtgagctgggccagtggggccagaccctgcatccccaagagctttggctacagcagtgtggtgtgtgtgtgcaatgccacctactgtgacagctttgacccccccaccttccctgccctgggcaccttcagcagatatgagagcaccagaagtggcagaagaatggagctgagcatgggccccatccaggccaaccacacaggcacaggcctgctgctgaccctgcagcctgagcagaagttccagaaggtgaagggctttgggggggccatgacagatgctgctgccctgaacatcctggccctgagcccccctgcccagaacctgctgctgaagagctacttcagtgaggagggcattggctacaacatcatcagagtgccaatggccagctgtgacttcagcatcagaacctacacctatgctgacacccctgatgacttccagctgcacaacttcagcctgcctgaggaggacaccaagctgaagatccccctgatccacagagccctgcagctggcccagagacctgtgagcctgctggccagcccctggaccagccccacctggctgaagaccaatggggctgtgaatggcaagggcagcctgaagggccagcctggggacatctaccaccagacctgggccagatactttgtgaagttcctggatgcctatgctgagcacaagctgcagttctgggctgtgacagctgagaatgagcccagtgctggcctgctgagtggctaccccttccagtgcctgggcttcacccctgagcaccagagagacttcattgccagagacctgggccccaccctggccaacagcacccaccacaatgtgagactgctgatgctggatgaccagagactgctgctgccccactgggccaaggtggtgctgacagaccctgaggctgccaagtatgtgcatggcattgctgtgcactggtacctggacttcctggcccctgccaaggccaccctgggggagacccacagactgttccccaacaccatgctgtttgccagtgaggcctgtgtgggcagcaagttctgggagcagagtgtgagactgggcagctgggacagaggcatgcagtacagccacagcatcatcaccaacctgctgtaccatgtggtgggctggacagactggaacctggccctgaaccctgaggggggccccaactgggtgagaaactttgtggacagccccatcattgtggacatcaccaaggacaccttctacaagcagcccatgttctaccacctgggccacttcagcaagttcatccctgagggcagccagagagtgggcctggtggccagccagaagaatgacctggatgctgtggccctgatgcaccctgatggcagtgctgtggtggtggtgctgaacagaagcagcaaggatgtgcccctgaccatcaaggaccctgctgtgggcttcctggagaccatcagccctggctacagcatccacacctacctgtggagaagacagtga

SEQ ID NO: 113 - DNA, 1611 bp, Artificial Sequence
  Codon optimized CO2-GBA1
atggagtttagcagccctagcagagaggaatgccccaagcctctgagccgggtgtcaatcatggccggatctctgacaggactgctgctgcttcaggccgtgtcttgggcttctggcgctagaccttgcatccccaagagcttcggctacagcagcgtcgtgtgcgtgtgcaatgccacctactgcgacagcttcgaccctcctacctttcctgctctgggcaccttcagcagatacgagagcaccagatccggcagacggatggaactgagcatgggacccatccaggccaatcacacaggcactggcctgctgctgacactgcagcctgagcagaaattccagaaagtgaaaggcttcggcggagccatgacagatgccgccgctctgaatatcctggctctgtctccaccagctcagaacctgctgctcaagagctacttcagcgaggaaggcatcggctacaacatcatccgggtgccaatggccagctgcgacttcagcatccggacctacacctacgccgacacacccgacgatttccagctgcacaacttcagcctgcctgaagaggacaccaagctgaagatccctctgatccacagagccctgcagctggcacaaagacccgtttctctgctggctagcccctggacatctcccacctggctgaaaacaaatggcgccgtgaatggcaagggcagcctgaaaggccaacctggcgatatctaccaccagacctgggccagatacttcgtgaagttcctggacgcctatgccgagcacaagctgcagttttgggccgtgacagccgagaacgaaccttctgctggactgctgagcggctacccctttcagtgcctgggctttacacccgagcaccagcgggactttatcgccagagatctgggacccacactggccaatagcacccaccataatgtgcggctgctgatgctggacgaccagagactgcttctgccccactgggctaaagtggtgctgacagatcctgaggccgccaaatacgtgcacggaatcgccgtgcactggtatctggactttctggcccctgccaaggccacactgggagagacacacagactgttccccaacaccatgctgttcgccagcgaagcctgtgtgggcagcaagttttgggaacagagcgtgcggctcggcagctgggatagaggcatgcagtacagccacagcatcatcaccaacctgctgtaccacgtcgtcggctggaccgactggaatctggccctgaatcctgaaggcggccctaactgggtccgaaacttcgtggacagccccatcatcgtggacatcaccaaggacaccttctacaagcagcccatgttctaccacctgggacacttcagcaagttcatccccgagggctctcagcgcgttggactggtggccagccagaagaatgatctggacgccgtggctctgatgcaccctgatggatctgctgtggtggtggtcctgaaccgcagcagcaaagatgtgcccctgaccatcaaggatcccgccgtgggattcctggaaacaatcagccctggctactccatccacacctacctgtggcggagacagtga

SEQ ID NO: 114 - DNA, 1962 bp, Homo sapiens
  misc_feature (1)..(1962): Iduronidase alpha-L- (IDUA)
atgcgtcccctgcgcccccgcgccgcgctgctggcgctcctggcctcgctcctggccgcgcccccggtggccccggccgaggccccgcacctggtgcatgtggacgcggcccgcgcgctgtggcccctgcggcgcttctggaggagcacaggcttctgccccccgctgccacacagccaggctgaccagtacgtcctcagctgggaccagcagctcaacctcgcctatgtgggcgccgtccctcaccgcggcatcaagcaggtccggacccactggctgctggagcttgtcaccaccagggggtccactggacggggcctgagctacaacttcacccacctggacgggtacctggaccttctcagggagaaccagctcctcccagggtttgagctgatgggcagcgcctcgggccacttcactgactttgaggacaagcagcaggtgtttgagtggaaggacttggtctccagcctggccaggagatacatcggtaggtacggactggcgcatgtttccaagtggaacttcgagacgtggaatgagccagaccaccacgactttgacaacgtctccatgaccatgcaaggcttcctgaactactacgatgcctgctcggagggtctgcgcgccgccagccccgccctgcggctgggaggccccggcgactccttccacaccccaccgcgatccccgctgagctggggcctcctgcgccactgccacgacggtaccaacttcttcactggggaggcgggcgtgcggctggactacatctccctccacaggaagggtgcgcgcagctccatctccatcctggagcaggagaaggtcgtcgcgcagcagatccggcagctcttccccaagttcgcggacacccccatttacaacgacgaggcggacccgctggtgggctggtccctgccacagccgtggagggcggacgtgacctacgcggccatggtggtgaaggtcatcgcgcagcatcagaacctgctactggccaacaccacctccgccttcccctacgcgctcctgagcaacgacaatgccttcctgagctaccacccgcaccccttcgcgcagcgcacgctcaccgcgcgcttccaggtcaacaacacccgcccgccgcacgtgcagctgttgcgcaagccggtgctcacggccatggggctgctggcgctgctggatgaggagcagctctgggccgaagtgtcgcaggccgggaccgtcctggacagcaaccacacggtgggcgtcctggccagcgcccaccgcccccagggcccggccgacgcctggcgcgccgcggtgctgatctacgcgagcgacgacacccgcgcccaccccaaccgcagcgtcgcggtgaccctgcggctgcgcggggtgccccccggcccgggcctggtctacgtcacgcgctacctggacaacgggctctgcagccccgacggcgagtggcggcgcctgggccggcccgtcttccccacggcagagcagttccggcgcatgcgcgcggctgaggacccggtggccgcggcgccccgccccttacccgccggcggccgcctgaccctgcgccccgcgctgcggctgccgtcgcttttgctggtgcacgtgtgtgcgcgccccgagaagccgcccgggcaggtcacgcggctccgcgccctgcccctgacccaagggcagctggttctggtctggtcggatgaacacgtgggctccaagtgcctgtggacatacgagatccagttctctcaggacggtaaggcgtacaccccggtcagcaggaagccatcgaccttcaacctctttgtgttcagcccagacacaggtgctgtctctggctcctaccgagttcgagccctggactactgggcccgaccaggccccttctcggaccctgtgccgtacctggaggtccctgtgccaagagggcccccatccccgggcaatccatga

SEQ ID NO: 115 - DNA, 1962 bp, Artificial Sequence
  Codon optimized CO1-IDUA
atgagacccctgagacccagagctgccctgctggccctgctggccagcctgctggctgccccccctgtggcccctgctgaggccccccaccttgtacatgtggatgctgccagagccctgtggcccctgagaagattctggagaagcacaggcttctgcccccccctgccccacagccaggctgaccagtatgtgctgagctgggaccagcagctgaacctggcctatgtgggggctgtgccccacagaggcatcaagcaggtgagaacccactggctgctggagctggtgaccaccagaggcagcacaggcagaggcctgagctacaacttcacccacctggatggctacctggacctgctgagagagaaccagctgctgcctggctttgagctgatgggcagtgccagtggccacttcacagactttgaggacaagcagcaggtgtttgagtggaaggacctggtgagcagcctggccagaagatacattggcagatatggcctggcccatgtgagcaagtggaactttgagacctggaatgagcctgaccaccatgactttgacaatgtgagcatgaccatgcagggcttcctgaactactatgatgcctgcagtgagggcctgagagctgccagccctgccctgagactggggggccctggggacagcttccacaccccccccagaagccccctgagctggggcctgctgagacactgccatgatggcaccaacttcttcacaggggaggctggggtgagactggactacatcagcctgcacagaaagggggccagaagcagcatcagcatcctggagcaggagaaggtggtggcccagcagatcagacagctgttccccaagtttgctgacacccccatctacaatgatgaggctgaccccctggtgggctggagcctgccccagccctggagagctgatgtgacctatgctgccatggtggtgaaggtgattgcccagcaccagaacctgctgctggccaacaccaccagtgccttcccctatgccctgctgagcaatgacaatgccttcctgagctaccacccccacccctttgcccagagaaccctgacagccagattccaggtgaacaacaccagacccccccatgtgcagctgctgagaaagcctgtgctgacagccatgggcctgctggccctgctggatgaggagcagctgtgggctgaggtgagccaggctggcacagtgctggacagcaaccacacagtgggggtgctggccagtgcccacagaccccagggccctgctgatgcctggagagctgctgtgctgatctatgccagtgatgacaccagagcccaccccaacagaagtgtggctgtgaccctgagactgagaggggtgccccctggccctggcctggtgtatgtgaccagatacctggacaatggcctgtgcagccctgatggggagtggagaagactgggcagacctgtgttccccacagctgagcagttcagaagaatgagagctgctgaggaccctgtggctgctgcccccagacccctgcctgctgggggcagactgaccctgagacctgccctgagactgcccagcctgctgctggtgcatgtgtgtgccagacctgagaagccccctggccaggtgaccagactgagagccctgcccctgacccagggccagctggtgctggtgtggagtgatgagcatgtgggcagcaagtgcctgtggacctatgagatccagttcagccaggatggcaaggcctacacccctgtgagcagaaagcccagcaccttcaacctgtttgtgttcagccctgacacaggggctgtgagtggcagctacagagtgagagccctggactactgggccagacctggccccttcagtgaccctgtgccctacctggaggtgcctgtgcccagaggcccccccagccctggcaacccctga

SEQ ID NO: 116 - DNA, 1578 bp, Homo sapiens
  misc_feature (1)..(1578): Cytochrome P450 family 4 subfamily V member 2 (CYP4V2)
atggcggggctctggctggggctcgtgtggcagaagctgctgctgtggggcgcggcgagtgccctttccctggccggcgccagtctggtcctgagcctgctgcagagggtggcgagctacgcgcggaaatggcagcagatgcggcccatccccacggtggcccgcgcctacccactggtgggccacgcgctgctgatgaagccggacgggcgagaattttttcagcagatcattgagtacacagaggaataccgccacatgccgctgctgaagctctgggtcgggccagtgcccatggtggccctttataatgcagaaaatgtggaggtaattttaactagttcaaagcaaattgacaaatcctctatgtacaagtttttagaaccatggcttggcctaggacttcttacaagtactggaaacaaatggcgctccaggagaaagatgttaacacccactttccattttaccattctggaagatttcttagatatcatgaatgaacaagcaaatatattggttaagaaacttgaaaaacacattaaccaagaagcatttaactgctttttttacatcactctttgtgccttagatatcatctgtgaaacagctatggggaagaatattggtgctcaaagtaatgatgattccgagtatgtccgtgcagtttatagaatgagtgagatgatatttcgaagaataaagatgccctggctttggcttgatctctggtatcttatgtttaaagaaggatgggaacacaaaaagagccttcagatcctacatacttttaccaacagtgtcatcgctgaacgggccaatgaaatgaacgccaatgaagactgtagaggtgatggcaggggctctgccccctccaaaaataaacgcagggcctttcttgacttgcttttaagtgtgactgatgacgaagggaacaggctaagtcatgaagatattcgagaagaagttgacaccttcatgtttgaggggcacgatacaactgcagctgcaataaactggtccttatacctgttgggttctaacccagaagtccagaaaaaagtggatcatgaattggatgacgtgtttgggaagtctgaccgtcccgctacagtagaagacctgaagaaacttcggtatctggaatgtgttattaaggagacccttcgcctttttccttctgttcctttatttgcccgtagtgttagtgaagattgtgaagtggcaggttacagagttctaaaaggcactgaagccgtcatcattccctatgcattgcacagagatccgagatacttccccaaccccgaggagttccagcctgagcggttcttccccgagaatgcacaagggcgccatccatatgcctacgtgcccttctctgctggccccaggaactgtataggtcaaaagtttgctgtgatggaagaaaagaccattctttcgtgcatcctgaggcacttttggatagaatccaaccagaaaagagaagagcttggtctagaaggacagttgattcttcgtccaagtaatggcatctggatcaagttgaagaggagaaatgcagatgaacgctaa

SEQ ID NO: 117 - DNA, 711 bp, Homo sapiens
  misc_feature (1)..(711): Retinoschisin 1 (RS1)
atgagccgcaagatagaaggctttttgttattacttctctttggctatgaagccacattgggattatcgtctaccgaggatgaaggcgaggacccctggtatcaaaaagcatgcgatgaaggcgaggacccctggtatcaaaaagcatgcaagtgcgattgccaaggaggacccaatgctctgtggtctgcaggtgccacctccttggactgtataccagaatgcccatatcacaagcctctgggtttcgagtcaggggaggtcacaccggaccagatcacctgctctaacccggagcagtatgtgggctggtattcttcgtggactgcaaacaaggcccggctcaacagtcaaggctttgggtgtgcctggctctccaagttccaggacagtagccagtggttacagatagatctgaaggagatcaaagtgatttcagggatcctcacccaggggcgctgtgacatcgatgagtggatgaccaagtacagcgtgcagtacaggaccgatgagcgcctgaactggatttactacaaggaccagactggaaacaaccgggtcttctatggcaactcggaccgcacctccacggttcagaacctgctgcggccccccatcatctcccgcttcatccgcctcatcccgctgggctggcacgtccgcattgccatccggatggagctgctggagtgcgtcagcaagtgtgcctga

SEQ ID NO: 118 - DNA, 2565 bp, Homo sapiens
  misc_feature (1)..(2565): Phosphodiesterase 6B (PDE6B)
atgagcctcagtgaggagcaggcccggagctttctggaccagaaccccgattttgcccgccagtactttgggaagaaactgagccctgagaatgtggccgcggcctgcgaggacgggtgcccgccggactgcgacagcctccgggacctctgccaggtggaggagagcacggcgctgctggagctggtgcaggatatgcaggagagcatcaacatggagcgcgtggtcttcaaggtcctgcggcgcctctgcaccctgctgcaggccgaccgctgcagcctcttcatgtaccgccagcgcaacggcgtggccgagctggccaccaggcttttcagcgtgcagccggacagcgtcctggaggactgcctggtgccccccgactccgagatcgtcttcccactggacatcggggtcgtgggccacgtggctcagaccaaaaagatggtgaacgtcgaggacgtggccgagtgccctcacttcagctcatttgctgacgagctcactgactacaagacaaagaatatgctggccacacccatcatgaatggcaaagacgtcgtggcggtgatcatggcagtgaacaagctcaacggcccattcttcaccagcgaagacgaagatgtgttcttgaagtacctgaattttgccacgttgtacctgaaaatctatcacctgagctacctccacaactgcgagacgcgccgcggccaggtgctgctgtggtcggccaacaaggtgtttgaggagctgacggacatcgagaggcagttccacaaggccttctacacggtgcgggcctacctcaactgcgagcggtactccgtgggcctcctggacatgaccaaggagaaggaattttttgacgtgtggtctgtgctgatgggagagtcccagccgtactcgggcccacgcacgcctgatggccgggaaattgtcttctacaaagtgatcgactacatcctccacggcaaggaggagatcaaggtcattcccacaccctcagccgatcactgggccctggccagcggccttccaagctacgtggcagaaagcggctttatttgtaacatcatgaatgcttccgctgacgaaatgttcaaatttcaggaaggggccctggacgactccgggtggctcatcaagaatgtgctgtccatgcccatcgtcaacaagaaggaggagattgtgggagtcgccacattttacaacaggaaagacgggaagccctttgacgaacaggacgaggttctcatggagtccctgacacagttcctgggctggtcagtgatgaacaccgacacctacgacaagatgaacaagctggagaaccgcaaggacatcgcacaggacatggtcctttaccacgtgaagtgcgacagggacgagatccagctcatcctgccaaccagagcgcgcctggggaaggagcctgctgactgcgatgaggacgagctgggcgaaatcctgaaggaggagctgccagggcccaccacatttgacatctacgaattccacttctctgacctggagtgcaccgaactggacctggtcaaatgtggcatccagatgtactacgagctgggcgtggtccgaaagttccagatcccccaggaggtcctggtgcggttcctgttctccatcagcaaaggctaccggagaatcacctaccacaactggcgccacggcttcaacgtggcccagacgatgttcacgctgctcatgaccggcaaactgaagagctactacacggacctggaggccttcgccatggtgacagccggcctgtgccatgacatcgaccaccgcggcaccaacaacctgtaccagatgaagtcccagaaccccttggctaaactccacggctcctcgattttggagcggcaccacctggagtttgggaagttcctgctctcggaggagaccctgaacatctaccagaacctgaaccggcggcagcacgagcacgtgatccacctgatggacatcgccatcatcgccacggacctggccctgtacttcaagaagagagcgatgtttcagaagatcgtggatgagtccaagaactaccaggacaagaagagctgggtggagtacctgtccctggagacgacccggaaggagatcgtcatggccatgatgatgacagcctgcgacctgtctgccatcaccaagccctgggaagtccagagcaaggtcgcacttctcgtggctgctgagttctgggagcaaggtgacttggaaaggacagtcttggatcagcagcccattcctatgatggaccggaacaaggcggccgagctccccaagctgcaagtgggcttcatcgacttcgtgtgcacattcgtgtacaaggagttctctcgtttccacgaagagatcctgcccatgttcgaccgactgcagaacaataggaaagagtggaaggcgctggctgatgagtatgaggccaaagtgaaggctctggaggagaaggaggaggaggagagggtggcagccaagaaagtaggcacagaaatttgcaatggcggcccagcacccaagtcttcaacctgctgtatcctgtga

SEQ ID NO: 119 - DNA, 1497 bp, Homo sapiens
  misc_feature (1)..(1497): Methyl-CpG Binding Protein (MeCP2)
atggccgccgccgccgccgccgcgccgagcggaggaggaggaggaggcgaggaggagagactggaagaaaagtcagaagaccaggacctccagggcctcaaggacaaacccctcaagtttaaaaaggtgaagaaagataagaaagaagagaaagagggcaagcatgagcccgtgcagccatcagcccaccactctgctgagcccgcagaggcaggcaaagcagagacatcagaagggtcaggctccgccccggctgtgccggaagcttctgcctcccccaaacagcggcgctccatcatccgtgaccggggacccatgtatgatgaccccaccctgcctgaaggctggacacggaagcttaagcaaaggaaatctggccgctctgctgggaagtatgatgtgtatttgatcaatccccagggaaaagcctttcgctctaaagtggagttgattgcgtacttcgaaaaggtaggcgacacatccctggaccctaatgattttgacttcacggtaactgggagagggagcccctcccggcgagagcagaaaccacctaagaagcccaaatctcccaaagctccaggaactggcagaggccggggacgccccaaagggagcggcaccacgagacccaaggcggccacgtcagagggtgtgcaggtgaaaagggtcctggagaaaagtcctgggaagctccttgtcaagatgccttttcaaacttcgccagggggcaaggctgaggggggtggggccaccacatccacccaggtcatggtgatcaaacgccccggcaggaagcgaaaagctgaggccgaccctcaggccattcccaagaaacggggccgaaagccggggagtgtggtggcagccgctgccgccgaggccaaaaagaaagccgtgaaggagtcttctatccgatctgtgcaggagaccgtactccccatcaagaagcgcaagacccgggagacggtcagcatcgaggtcaaggaagtggtgaagcccctgctggtgtccaccctcggtgagaagagcgggaaaggactgaagacctgtaagagccctgggcggaaaagcaaggagagcagccccaaggggcgcagcagcagcgcctcctcaccccccaagaaggagcaccaccaccatcaccaccactcagagtccccaaaggcccccgtgccactgctcccacccctgcccccacctccacctgagcccgagagctccgaggaccccaccagcccccctgagccccaggacttgagcagcagcgtctgcaaagaggagaagatgcccagaggaggctcactggagagcgacggctgccccaaggagccagctaagactcagcccgcggttgccaccgccgccacggccgcagaaaagtacaaacaccgaggggagggagagcgcaaagacattgtttcatcctccatgccaaggccaaacagagaggagcctgtggacagccggacgcccgtgaccgagagagttagctag

SEQ ID NO: 120 - DNA, 2232 bp, Homo sapiens
  misc_feature (1)..(2232): N-acetyl-alpha-glucosaminidase (NAGLU)
atggaggcggtggcggtggccgcggcggtgggggtccttctcctggccggggccgggggcgcggcaggcgacgaggcccgggaggcggcggccgtgcgggcgctcgtggcccggctgctggggccaggccccgcggccgacttctccgtgtcggtggagcgcgctctggctgccaagccgggcttggacacctacagcctgggcggcggcggcgcggcgcgcgtgcgggtgcgcggctccacgggcgtggcggccgccgcggggctgcaccgctacctgcgcgacttctgtggctgccacgtggcctggtccggctctcagctgcgcctgccgcggccactgccagccgtgccgggggagctgaccgaggccacgcccaacaggtaccgctattaccagaatgtgtgcacgcaaagctactccttcgtgtggtgggactgggcccgctgggagcgagagatagactggatggcgctgaatggcatcaacctggcactggcctggagcggccaggaggccatctggcagcgggtgtacctggccttgggcctgacccaggcagagatcaatgagttctttactggtcctgccttcctggcctgggggcgaatgggcaacctgcacacctgggatggccccctgcccccctcctggcacatcaagcagctttacctgcagcaccgggtcctggaccagatgcgctccttcggcatgaccccagtgctgcctgcattcgcggggcatgttcccgaggctgtcaccagggtgttccctcaggtcaatgtcacgaagatgggcagttggggccactttaactgttcctactcctgctccttccttctggctccggaagaccccatattccccatcatcgggagcctcttcctgcgagagctgatcaaagagtttggcacagaccacatctatggggccgacactttcaatgagatgcagccaccttcctcagagccctcctaccttgccgcagccaccactgccgtctatgaggccatgactgcagtggatactgaggctgtgtggctgctccaaggctggctcttccagcaccagccgcagttctgggggcccgcccagatcagggctgtgctgggagctgtgccccgtggccgcctcctggttctggacctgtttgctgagagccagcctgtgtatacccgcactgcctccttccagggccagcccttcatctggtgcatgctgcacaactttgggggaaaccatggtctttttggagccctagaggctgtgaacggaggcccagaagctgcccgcctcttccccaactccaccatggtaggcacgggcatggcccccgagggcatcagccagaacgaagtggtctattccctcatggctgagctgggctggcgaaaggacccagtgccagatttggcagcctgggtgaccagctttgccgcccggcggtatggggtctcccacccggacgcaggggcagcgtggaggctactgctccggagtgtgtacaactgctccggggaggcctgcaggggccacaatcgtagcccgctggtcaggcggccgtccctacagatgaataccagcatctggtacaaccgatctgatgtgtttgaggcctggcggctgctgctcacatctgctccctccctggccaccagccccgccttccgctacgacctgctggacctcactcggcaggcagtgcaggagctggtcagcttgtactatgaggaggcaagaagcgcctacctgagcaaggagctggcctccctgttgagggctggaggcgtcctggcctatgagctgctgccggcactggacgaggtgctggctagtgacagccgcttcttgctgggcagctggctagagcaggcccgagcagcggcagtcagtgaggccgaggccgatttctacgagcagaacagccgctaccagctgaccttgtgggggccagaaggcaacatcctggactatgccaacaagcagctggcggggttggtggccaactactacacccctcgctggcggcttttcctggaggcgctggttgacagtgtggcccagggcatccctttccaacagcaccagtttgacaaaaatgtcttccaactggagcaggccttcgttctcagcaagcagaggtaccccagccagccgcgaggagacactgtggacctggccaagaagatcttcctcaaatattaccccggctgggtggccggctcttggtga

SEQ ID NO: 121 - DNA, 1317 bp, Homo sapiens; identical to SEQ ID NO: 12
  misc_feature (1)..(1317): Ceroid Lipofuscinosis, Neuronal 3 (CLN3)

SEQ ID NO: 122 - DNA, 1317 bp, Artificial Sequence; identical to SEQ ID NO: 13
  Codon optimized CO1-CLN3

SEQ ID NO: 123 - DNA, 2859 bp, Homo sapiens
  misc_feature (1)..(2859): Acid Alpha-Glucosidase (GAA)
atgggagtgaggcacccgccctgctcccaccggctcctggccgtctgcgccctcgtgtccttggcaaccgctgcactcctggggcacatcctactccatgatttcctgctggttccccgagagctgagtggctcctccccagtcctggaggagactcacccagctcaccagcagggagccagcagaccagggccccgggatgcccaggcacaccccggccgtcccagagcagtgcccacacagtgcgacgtcccccccaacagccgcttcgattgcgcccctgacaaggccatcacccaggaacagtgcgaggcccgcggctgttgctacatccctgcaaagcaggggctgcagggagcccagatggggcagccctggtgcttcttcccacccagctaccccagctacaagctggagaacctgagctcctctgaaatgggctacacggccaccctgacccgtaccacccccaccttcttccccaaggacatcctgaccctgcggctggacgtgatgatggagactgagaaccgcctccacttcacgatcaaagatccagctaacaggcgctacgaggtgcccttggagaccccgcatgtccacagccgggcaccgtccccactctacagcgtggagttctccgaggagcccttcggggtgatcgtgcgccggcagctggacggccgcgtgctgctgaacacgacggtggcgcccctgttctttgcggaccagttccttcagctgtccacctcgctgccctcgcagtatatcacaggcctcgccgagcacctcagtcccctgatgctcagcaccagctggaccaggatcaccctgtggaaccgggaccttgcgcccacgcccggtgcgaacctctacgggtctcaccctttctacctggcgctggaggacggcgggtcggcacacggggtgttcctgctaaacagcaatgccatggatgtggtcctgcagccgagccctgcccttagctggaggtcgacaggtgggatcctggatgtctacatcttcctgggcccagagcccaagagcgtggtgcagcagtacctggacgttgtgggatacccgttcatgccgccatactggggcctgggcttccacctgtgccgctggggctactcctccaccgctatcacccgccaggtggtggagaacatgaccagggcccacttccccctggacgtccagtggaacgacctggactacatggactcccggagggacttcacgttcaacaaggatggcttccgggacttcccggccatggtgcaggagctgcaccagggcggccggcgctacatgatgatcgtggatcctgccatcagcagctcgggccctgccgggagctacaggccctacgacgagggtctgcggaggggggttttcatcaccaacgagaccggccagccgctgattgggaaggtatggcccgggtccactgccttccccgacttcaccaaccccacagccctggcctggtgggaggacatggtggctgagttccatgaccaggtgcccttcgacggcatgtggattgacatgaacgagccttccaacttcatcaggggctctgaggacggctgccccaacaatgagctggagaacccaccctacgtgcctggggtggttggggggaccctccaggcggccaccatctgtgcctccagccaccagtttctctccacacactacaacctgcacaacctctacggcctgaccgaagccatcgcctcccacagggcgctggtgaaggctcgggggacacgcccatttgtgatctcccgctcgacctttgctggccacggccgatacgccggccactggacgggggacgtgtggagctcctgggagcagctcgcctcctccgtgccagaaatcctgcagtttaacctgctgggggtgcctctggtcggggccgacgtctgcggcttcctgggcaacacctcagaggagctgtgtgtgcgctggacccagctgggggccttctaccccttcatgcggaaccacaacagcctgctcagtctgccccaggagccgtacagcttcagcgagccggcccagcaggccatgaggaaggccctcaccctgcgctacgcactcctcccccacctctacacactgttccaccaggcccacgtcgcgggggagaccgtggcccggcccctcttcctggagttccccaaggactctagcacctggactgtggaccaccagctcctgtggggggaggccctgctcatcaccccagtgctccaggccgggaaggccgaagtgactggctacttccccttgggcacatggtacgacctgcagacggtgccagtagaggcccttggcagcctcccacccccacctgcagctccccgtgagccagccatccacagcgaggggcagtgggtgacgctgccggcccccctggacaccatcaacgtccacctccgggctgggtacatcatccccctgcagggccctggcctcacaaccacagagtcccgccagcagcccatggccctggctgtggccctgaccaagggtggggaggcccgaggggagctgttctgggacgatggagagagcctggaagtgctggagcgaggggcctacacacaggtcatcttcctggccaggaataacacgatcgtgaatgagctggtacgtgtgaccagtgagggagctggcctgcagctgcagaaggtgactgtcctgggcgtggccacggcgccccagcaggtcctctccaacggtgtccctgtctccaacttcacctacagccccgacaccaaggtcctggacatctgtgtctcgctgttgatgggagagcagtttctcgtcagctggtgttag

SEQ ID NO: 124 - DNA, 2859 bp, Artificial Sequence; identical to SEQ ID NO: 5
  Codon optimized CO1-GAA

SEQ ID NO: 125 - DNA, 2859 bp, Artificial Sequence; identical to SEQ ID NO: 7
  Codon optimized CO2-GAA

SEQ ID NO: 126 - DNA, 2859 bp, Artificial Sequence
  Codon optimized CO3-GAA
atgggggtgagacaccccccctgcagccacagactgctggctgtgtgtgccctggtgagcctggccacagctgccctgctgggccacatcctgctgcatgacttcctactagtgcccagagagctgagtggcagcagccctgtgctggaggagacccaccctgcccaccagcagggggccagcagacctggccccagagatgcccaggcccaccctggcagacccagagctgtgcccacccagtgtgatgtgccccccaacagcagatttgactgtgcccctgacaaggccatcacccaggagcagtgtgaggccagaggctgctgctacatccctgccaagcagggcctgcagggggcccagatgggccagccctggtgcttcttcccccccagctaccccagctacaagctggagaacctgagcagcagtgagatgggctacacagccaccctgaccagaaccacccccaccttcttccccaaggacatcctgaccctgagactggatgtgatgatggagacagagaacagactgcacttcaccatcaaggaccctgccaacagaagatatgaggtgcccctggagaccccccatgtgcacagcagagcccccagccccctgtacagtgtggagttcagtgaggagccctttggggtgattgtgagaagacagctggatggcagagtgctgctgaacaccacagtggcccccctgttctttgctgaccagttcctgcagctgagcaccagcctgcccagccagtacatcacaggcctggctgagcacctgagccccctgatgctgagcaccagctggaccagaatcaccctgtggaacagagacctggcccccacccctggggccaacctgtatggcagccaccccttctacctggccctggaggatgggggcagtgcccatggggtgttcctgctgaacagcaatgccatggatgtggtgctgcagcccagccctgccctgagctggagaagcacagggggcatcctggatgtgtacatcttcctgggccctgagcccaagagtgtggtgcagcagtacctggatgtggtgggctaccccttcatgcccccctactggggcctgggcttccacctgtgcagatggggctacagcagcacagccatcaccagacaggtggtggagaacatgaccagagcccacttccccctggatgtgcagtggaatgacctggactacatggacagcagaagagacttcaccttcaacaaggatggcttcagagacttccctgccatggtgcaggagctgcaccaggggggcagaagatacatgatgattgtggaccctgccatcagcagcagtggccctgctggcagctacagaccctatgatgagggcctgagaagaggggtgttcatcaccaatgagacaggccagcccctgattggcaaggtgtggcctggcagcacagccttccctgacttcaccaaccccacagccctggcctggtgggaggacatggtggctgagttccatgaccaggtgccctttgatggcatgtggattgacatgaatgagcccagcaacttcatcagaggcagtgaggatggctgccccaacaatgagctggagaaccccccctatgtgcctggggtggtggggggcaccctgcaggctgccaccatctgtgccagcagccaccagttcctgagcacccactacaacctgcacaacctgtatggcctgacagaggccattgccagccacagagccctggtgaaggccagaggcaccagaccctttgtgatcagcagaagcacctttgctggccatggcagatatgctggccactggacaggggatgtgtggagcagctgggagcagctggccagcagtgtgcctgagatcctgcagttcaacctgctgggggtgcccctggtgggggctgatgtgtgtggcttcctgggcaacaccagtgaggagctgtgtgtgagatggacccagctgggggccttctaccccttcatgagaaaccacaacagcctgctgagcctgccccaggagccctacagcttcagtgagcctgcccagcaggccatgagaaaggccctgaccctgagatatgccctgctgccccacctgtacaccctgttccaccaggcccatgtggctggggagacagtggccagacccctgttcctggagttccccaaggacagcagcacctggacagtggaccaccagctgctgtggggggaggccctgctgatcacccctgtgctgcaggctggcaaggctgaggtgacaggctacttccccctgggcacctggtatgacctgcagacagtgcctgtggaggccctgggcagcctgccccccccccctgctgcccccagagagcctgccatccacagtgagggccagtgggtgaccctgcctgcccccctggacaccatcaatgtgcacctgagagctggctacatcatccccctgcagggccctggcctgaccaccacagagagcagacagcagcccatggccctggctgtggccctgaccaaggggggggaggccagaggggagctgttctgggatgatggggagagcctggaggtgctggagagaggggcctacacccaggtgatcttcctggccagaaacaacaccattgtgaatgagctggtgagagtgaccagtgagggggctggcctgcagctgcagaaggtgacagtgctgggggtggccacagccccccagcaggtgctgagcaatggggtgcctgtgagcaacttcacctacagccctgacaccaaggtgctggacatctgtgtgagcctgctgatgggggagcagttcctggtgagctggtgctga

SEQ ID NO: 127 - DNA, 1290 bp, Homo sapiens; identical to SEQ ID NO: 9
  misc_feature (1)..(1290): Alpha-Galactosidase A (GLA)

SEQ ID NO: 128 - DNA, 1290 bp, Artificial Sequence; identical to SEQ ID NO: 10
  Codon optimized CO1-GLA

SEQ ID NO: 129 - DNA, 1377 bp, Artificial Sequence
  Codon optimized + GET, CO1-GLA-GET
atgcagctgagaaatcctgaactgcacctgggctgtgccctggctctgagatttctggctctggtgtcctgggacattcctggcgctagagccctggataatggcctggccagaacacctacaatgggctggctgcactgggagagattcatgtgcaacctggactgccaagaggaacccgacagctgcatcagcgagaagctgttcatggaaatggccgagctgatggtgtccgaaggctggaaggatgccggctacgagtacctgtgcatcgacgattgctggatggcccctcagagagattctgagggcagactgcaggccgatcctcagagatttcctcacggaatccggcagctggccaactacgtgcactctaagggactgaagctgggcatctacgccgacgtgggcaacaagacatgtgccggctttccaggcagcttcggctactacgatatcgacgcccagacctttgccgattggggcgtcgacctgctgaagttcgatggctgctactgcgacagcctggaaaacctggccgacggctacaaacacatgtctctggccctgaaccggaccggcagatctatcgtgtactcttgcgagtggcccctgtacatgtggcccttccagaagcctaactacaccgagatcagacagtactgcaaccactggcggaacttcgccgacatcgatgacagctggaagtccatcaagagcatcctggactggaccagcttcaatcaagagcggatcgtggatgtggctggcccaggcggatggaacgatcctgatatgctggtcatcggcaacttcggcctgagctggaatcagcaagtgacccagatggccctgtgggccattatggccgctcctctgttcatgagcaacgacctgagacacatcagccctcaggccaaggctctgctgcaggataaggacgtgatcgccatcaaccaggatcctctgggcaagcagggctatcagctgagacagggcgacaatttcgaagtgtgggaaagacctctgagcggcctggcttgggccgtcgccatgatcaatagacaagagatcggcggaccccggtcctatacaattgccgtggcttctctcggaaaaggcgtggcctgcaatcctgcctgctttatcacacagctgctccccgtgaagagaaagctgggcttttacgagtggaccagcagactgagatcccacatcaaccccacaggcactgttctgctgcaactggaaaacacaatgcagatgagcctgaaggacctgctgcggagaagaagaaggcgcagacgcaagcgcaagaagaaaggcaaaggcctcggcaagaagcgggacccctgtctgagaaagtacaagtaa

SEQ ID NO: 130 - DNA, 1290 bp, Artificial Sequence
  Codon optimized CO2-GLA
atgcagctgagaaaccctgagctgcacctgggctgtgccctggccctgagattcctggccctggtgagctgggacatccctggggccagagccctggacaatgggctagccagaacccccaccatgggctggctgcactgggagagattcatgtgcaacctggactgccaggaggagcctgacagctgcatcagtgagaagctgttcatggagatggctgagctgatggtgagtgagggctggaaggatgctggctatgagtacctgtgcattgatgactgctggatggccccccagagagacagtgagggcagactgcaggctgacccccagagattcccccatggcatcagacagctggccaactatgtgcacagcaagggcctgaagctgggcatctatgctgatgtgggcaacaagacctgtgctggcttccctggcagctttggctactatgacattgatgcccagacctttgctgactggggggtggacctgctgaagtttgatggctgctactgtgacagcctggagaacctggctgatggctacaagcacatgagcctggccctgaacagaacaggcagaagcattgtgtacagctgtgagtggcccctgtacatgtggcccttccagaagcccaactacacagagatcagacagtactgcaaccactggagaaactttgctgacattgatgacagctggaagagcatcaagagcatcctggactggaccagcttcaaccaggagagaattgtggatgtggctggccctgggggctggaatgaccctgacatgctggtgattggcaactttggcctgagctggaaccagcaggtgacccagatggccctgtgggccatcatggctgcccccctgttcatgagcaatgacctgagacacatcagcccccaggccaaggccctgctgcaggacaaggatgtgattgccatcaaccaggaccccctgggcaagcagggctaccagctgagacagggggacaactttgaggtgtgggagagacccctgagtggcctggcctgggctgtggccatgatcaacagacaggagattgggggccccagaagctacaccattgctgtggccagcctgggcaagggggtggcctgcaaccctgcctgcttcatcacccagctgctgcctgtgaagagaaagctgggcttctatgagtggaccagcagactgagaagccacatcaaccccacaggcacagtgctgctgcagctggagaacaccatgcagatgagcctgaaggacctgctgtga

SEQ ID NO: 131 - DNA, 1290 bp, Artificial Sequence
  Codon optimized CO3-GLA
atgcagctgagaaaccctgagctgcacctgggctgtgccctggccctgagattcctggccctggtgagctgggacatccctggggccagagccctggacaatgggctagccagaacccccaccatgggctggctgcactgggagagattcatgtgcaacctggactgccaggaggagcctgacagctgcatcagtgagaagctgttcatggagatggctgagctgatggtgagtgagggctggaaggatgctggctatgagtacctgtgcattgatgactgctggatggccccccagagagacagtgagggcagactgcaggctgacccccagagattcccccatggcatcagacagctggccaactatgtgcacagcaagggcctgaagctgggcatctatgctgatgtgggcaacaagacctgtgctggcttccctggcagctttggctactatgacattgatgcccagacctttgctgactggggggtggacctgctgaagtttgatggctgctactgtgacagcctggagaacctggctgatggctacaagcacatgagcctggccctgaacagaacaggcagaagcattgtgtacagctgtgagtggcccctgtacatgtggcccttccagaagcccaactacacagagatcagacagtactgcaaccactggagaaactttgctgacattgatgacagctggaagagcatcaagagcatcctggactggaccagcttcaaccaggagagaattgtggatgtggctggccctgggggctggaatgaccctgacatgctggtgattggcaactttggcctgagctggaaccagcaggtgacccagatggccctgtgggccatcatggctgcccccctgttcatgagcaatgacctgagacacatcagcccccaggccaaggccctgctgcaggacaaggatgtgattgccatcaaccaggaccccctgggcaagcagggctaccagctgagacagggggacaactttgaggtgtgggagagacccctgagtggcctggcctgggctgtggccatgatcaacagacaggagattgggggccccagaagctacaccattgctgtggcttccctgggtaaaggagtggcctgtaatcctgcctgcttcatcacacagctcctccctgtgaaaaggaagctagggttctatgaatggacttcaaggttaagaagtcacataaatcccacaggcactgttttgcttcagctagaaaatacaatgcagatgtcattaaaagacttactttaa

SEQ ID NO: 132 - DNA, 4287 bp, Artificial Sequence; identical to SEQ ID NO: 4
  Codon optimized, Cystic Fibrosis Transmembrane Regulator deltaR (CFTRdeltaR) contains R domain deletion

SEQ ID NO: 133 - DNA, 4443 bp, Artificial Sequence; identical to SEQ ID NO: 93
  Codon optimized, full length Cystic Fibrosis Transmembrane Regulator (CFTR)

SEQ ID NO: 134 - protein, 502 aa, Homo sapiens
  MISC_FEATURE (1)..(502): Sulfoglucosamine sulfohydrolase (SGSH)
MSCPVPACCALLLVLGLCRARPRNALLLLADDGGFESGAYNNSAIATPHLDALARRSLLFRNAFTSVSSCSPSRASLLTGLPQHQNGMYGLHQDVHHFNSFDKVRSLPLLLSQAGVRTGIIGKKHVGPETVYPFDFAYTEENGSVLQVGRNITRIKLLVRKFLQTQDDQPFFLYVAFHDPHRCGHSQPQYGTFCEKFGNGESGMGRIPDWTPQAYDPLDVLVPYFVPNTPAARADLAAQYTTVGRMDQGVGLVLQELRDAGVLNDTLVIFTSDNGIPFPSGRTNLYWPGTAEPLLVSSPEHPKRWGQVSEAYVSLLDLTPTILDWFSIPYPSYAIFGSKTIHLTGRSLLPALEAEPLWATVFGSQSHHEVTMSYPMRSVQHRHFRLVHNLNFKMPFPIDQDFYVSPTFQDLLNRTTAGQPTGWYKDLRHYYYRARWELYDRSRDPHETQNLATDPRFAQLLEMLRDQLAKWQWETHDPWVCAPDGVLEEKLSPQCQPLHNEL

SEQ ID NO: 135 - protein, 531 aa, Artificial Sequence
  Codon optimized + GET CO1-SGSH-GET
MSCPVPACCALLLVLGLCRARPRNALLLLADDGGFESGAYNNSAIATPHLDALARRSLLFRNAFTSVSSCSPSRASLLTGLPQHQNGMYGLHQDVHHFNSFDKVRSLPLLLSQAGVRTGIIGKKHVGPETVYPFDFAYTEENGSVLQVGRNITRIKLLVRKFLQTQDDQPFFLYVAFHDPHRCGHSQPQYGTFCEKFGNGESGMGRIPDWTPQAYDPLDVLVPYFVPNTPAARADLAAQYTTVGRMDQGVGLVLQELRDAGVLNDTLVIFTSDNGIPFPSGRTNLYWPGTAEPLLVSSPEHPKRWGQVSEAYVSLLDLTPTILDWFSIPYPSYAIFGSKTIHLTGRSLLPALEAEPLWATVFGSQSHHEVTMSYPMRSVQHRHFRLVHNLNFKMPFPIDQDFYVSPTFQDLLNRTTAGQPTGWYKDLRHYYYRARWELYDRSRDPHETQNLATDPRFAQLLEMLRDQLAKWQWETHDPWVCAPDGVLEEKLSPQCQPLHNELRRRRRRRRKRKKKGKGLGKKRDPCLRKYK

SEQ ID NO: 136 - protein, 306 aa, Artificial Sequence
  Codon optimized Ceroid Lipofuscinosis, Neuronal, 1 (CLN1)
MASPGCLWLLAVALLPWTCASRALQHLDPPAPLPLVIWHGMGDSCCNPLSMGAIKKMVEKKIPGIYVLSLEIGKTLMEDVENSFFLNVNSQVTTVCQALAKDPKLQQGYNAMGFSQGGQFLRAVAQRCPSPPMINLISVGGQHQGVFGLPRCPGESSHICDFIRKTLNAGAYSKVVQERLVQAEYWHDPIKEDVYRNHSIFLADINQERGINESYKKNLMALKKFVMVKFLNDSIVDPVDSEWFGFYRSGQAKETIPLQETSLYTQDRLGLKEMDNAGQLVFLATEGDHLQLSEEWFYAHIIPFLG

SEQ ID NO: 137 - protein, 294 aa, Homo sapiens
  MISC_FEATURE (1)..(294): Survival Motor Neuron 1 (SMN1)
MAMSSGGSGGGVPEQEDSVLFRRGTGQSDDSDIWDDTALIKAYDKAVASFKHALKNGDICETSGKPKTTPKRKPAKKNKSQKKNTAASLQQWKVGDKCSAIWSEDGCIYPATIASIDFKRETCVVVYTGYGNREEQNLSDLLSPICEVANNIEQNAQENENESQVSTDESENSRSPGNKSDNIKPKSAPWNSFLPPPPPMPGPRLGPGKPGLKFNGPPPPPPPPPPHLLSCWLPPFPSGPPIIPPPPPICPDSLDDADALGSMLISWYMSGYHTGYYMGFRQNQKEGRCSHSLN

SEQ ID NO: 138 - protein, 515 aa, Homo sapiens
  MISC_FEATURE (1)..(515): Tissue Non-specific Alkaline Phosphatase (TNALP)
MISPFLVLAIGTCLTNSLVPEKEKDPKYWRDQAQETLKYALELQKLNTNVAKNVIMFLGDGMGVSTVTAARILKGQLHHNPGEETRLEMDKFPFVALSKTYNTNAQVPDSAGTATAYLCGVKANEGTVGVSAATERSRCNTTQGNEVTSILRWAKDAGKSVGIVTTTRVNHATPSAAYAHSADRDWYSDNEMPPEALSQGCKDIAYQLMHNIRDIDVIMGGGRKYMYPKNKTDVEYESDEKARGTRLDGLDLVDTWKSFKPRYKHSHFIWNRTELLTLDPHNVDYLLGLFEPGDMQYELNRNNVTDPSLSEMVVVAIQILRKNPKGFFLLVEGGRIDHGHHEGKAKQALHEAVEMDRAIGQAGSLTSSEDTLTVVTADHSHVFTFGGYTPRGNSIFGLAPMLSDTDKKPFTAILYGNGPGYKVVGGERENVSMVDYAHNNYQAQSAVPLRHETHGGEDVAVFSKGPMAHLLHGVHEQNYVPHVMAYAACIGANLGHCAPASSAGSDDDDDDDDDD

SEQ ID NO: 139 - protein, 211 aa, Homo sapiens
  MISC_FEATURE (1)..(211): Glial Cell Derived Neurotrophic Factor (GDNF)
MKLWDVVAVCLVLLHTASAFPLPAGKRPPEAPAEDRSLGRRRAPFALSSDSNMPEDYPDQFDDVMDFIQATIKRLKRSPDKQMAVLPRRERNRQAAAANPENSRGKGRRGQRGKNRGCVLTAIHLNVTDLGLGYETKEELIFRYCSGSCDAAETTYDKILKNLSRNRRLVSDKVGQACCRPIAFDDDLSFLDDNLVYHILRKHSAKRCGCI

SEQ ID NO: 140 - protein, 536 aa, Homo sapiens
  MISC_FEATURE (1)..(536): Tissue Glucosyl Ceramidase beta (GBA1)
MEFSSPSREECPKPLSRVSIMAGSLTGLLLLQAVSWASGARPCIPKSFGYSSVVCVCNATYCDSFDPPTFPALGTFSRYESTRSGRRMELSMGPIQANHTGTGLLLTLQPEQKFQKVKGFGGAMTDAAALNILALSPPAQNLLLKSYFSEEGIGYNIIRVPMASCDFSIRTYTYADTPDDFQLHNFSLPEEDTKLKIPLIHRALQLAQRPVSLLASPWTSPTWLKTNGAVNGKGSLKGQPGDIYHQTWARYFVKFLDAYAEHKLQFWAVTAENEPSAGLLSGYPFQCLGFTPEHQRDFIARDLGPTLANSTHHNVRLLMLDDQRLLLPHWAKVVLTDPEAAKYVHGIAVHWYLDFLAPAKATLGETHRLFPNTMLFASEACVGSKFWEQSVRLGSWDRGMQYSHSIITNLLYHVVGWTDWNLALNPEGGPNWVRNFVDSPIIVDITKDTFYKQPMFYHLGHFSKFIPEGSQRVGLVASQKNDLDAVALMHPDGSAVVVVLNRSSKDVPLTIKDPAVGFLETISPGYSIHTYLWRRQ

SEQ ID NO: 141 - protein, 653 aa, Homo sapiens
  MISC_FEATURE (1)..(653): Iduronidase alpha-L- (IDUA)
MRPLRPRAALLALLASLLAAPPVAPAEAPHLVHVDAARALWPLRRFWRSTGFCPPLPHSQADQYVLSWDQQLNLAYVGAVPHRGIKQVRTHWLLELVTTRGSTGRGLSYNFTHLDGYLDLLRENQLLPGFELMGSASGHFTDFEDKQQVFEWKDLVSSLARRYIGRYGLAHVSKWNFETWNEPDHHDFDNVSMTMQGFLNYYDACSEGLRAASPALRLGGPGDSFHTPPRSPLSWGLLRHCHDGTNFFTGEAGVRLDYISLHRKGARSSISILEQEKVVAQQIRQLFPKFADTPIYNDEADPLVGWSLPQPWRADVTYAAMVVKVIAQHQNLLLANTTSAFPYALLSNDNAFLSYHPHPFAQRTLTARFQVNNTRPPHVQLLRKPVLTAMGLLALLDEEQLWAEVSQAGTVLDSNHTVGVLASAHRPQGPADAWRAAVLIYASDDTRAHPNRSVAVTLRLRGVPPGPGLVYVTRYLDNGLCSPDGEWRRLGRPVFPTAEQFRRMRAAEDPVAAAPRPLPAGGRLTLRPALRLPSLLLVHVCARPEKPPGQVTRLRALPLTQGQLVLVWSDEHVGSKCLWTYEIQFSQDGKAYTPVSRKPSTFNLFVFSPDTGAVSGSYRVRALDYWARPGPFSDPVPYLEVPVPRGPPSPGNP

SEQ ID NO: 142 - protein, 525 aa, Homo sapiens
  MISC_FEATURE (1)..(525): Cytochrome P450 family 4 subfamily V member 2 (CYP4V2)
MAGLWLGLVWQKLLLWGAASALSLAGASLVLSLLQRVASYARKWQQMRPIPTVARAYPLVGHALLMKPDGREFFQQIIEYTEEYRHMPLLKLWVGPVPMVALYNAENVEVILTSSKQIDKSSMYKFLEPWLGLGLLTSTGNKWRSRRKMLTPTFHFTILEDFLDIMNEQANILVKKLEKHINQEAFNCFFYITLCALDIICETAMGKNIGAQSNDDSEYVRAVYRMSEMIFRRIKMPWLWLDLWYLMFKEGWEHKKSLQILHTFTNSVIAERANEMNANEDCRGDGRGSAPSKNKRRAFLDLLLSVTDDEGNRLSHEDIREEVDTFMFEGHDTTAAAINWSLYLLGSNPEVQKKVDHELDDVFGKSDRPATVEDLKKLRYLECVIKETLRLFPSVPLFARSVSEDCEVAGYRVLKGTEAVIIPYALHRDPRYFPNPEEFQPERFFPENAQGRHPYAYVPFSAGPRNCIGQKFAVMEEKTILSCILRHFWIESNQKREELGLEGQLILRPSNGIWIKLKRRNADER

SEQ ID NO: 143 - protein, 236 aa, Homo sapiens
  MISC_FEATURE (1)..(236): Retinoschisin 1 (RS1)
MSRKIEGFLLLLLFGYEATLGLSSTEDEGEDPWYQKACDEGEDPWYQKACKCDCQGGPNALWSAGATSLDCIPECPYHKPLGFESGEVTPDQITCSNPEQYVGWYSSWTANKARLNSQGFGCAWLSKFQDSSQWLQIDLKEIKVISGILTQGRCDIDEWMTKYSVQYRTDERLNWIYYKDQTGNNRVFYGNSDRTSTVQNLLRPPIISRFIRLIPLGWHVRIAIRMELLECVSKCA

SEQ ID NO: 144 - protein, 854 aa, Homo sapiens
  MISC_FEATURE (1)..(854): Phosphodiesterase 6B (PDE6B)
MSLSEEQARSFLDQNPDFARQYFGKKLSPENVAAACEDGCPPDCDSLRDLCQVEESTALLELVQDMQESINMERVVFKVLRRLCTLLQADRCSLFMYRQRNGVAELATRLFSVQPDSVLEDCLVPPDSEIVFPLDIGVVGHVAQTKKMVNVEDVAECPHFSSFADELTDYKTKNMLATPIMNGKDVVAVIMAVNKLNGPFFTSEDEDVFLKYLNFATLYLKIYHLSYLHNCETRRGQVLLWSANKVFEELTDIERQFHKAFYTVRAYLNCERYSVGLLDMTKEKEFFDVWSVLMGESQPYSGPRTPDGREIVFYKVIDYILHGKEEIKVIPTPSADHWALASGLPSYVAESGFICNIMNASADEMFKFQEGALDDSGWLIKNVLSMPIVNKKEEIVGVATFYNRKDGKPFDEQDEVLMESLTQFLGWSVMNTDTYDKMNKLENRKDIAQDMVLYHVKCDRDEIQLILPTRARLGKEPADCDEDELGEILKEELPGPTTFDIYEFHFSDLECTELDLVKCGIQMYYELGVVRKFQIPQEVLVRFLFSISKGYRRITYHNWRHGFNVAQTMFTLLMTGKLKSYYTDLEAFAMVTAGLCHDIDHRGTNNLYQMKSQNPLAKLHGSSILERHHLEFGKFLLSEETLNIYQNLNRRQHEHVIHLMDIAIIATDLALYFKKRAMFQKIVDESKNYQDKKSWVEYLSLETTRKEIVMAMMMTACDLSAITKPWEVQSKVALLVAAEFWEQGDLERTVLDQQPIPMMDRNKAAELPKLQVGFIDFVCTFVYKEFSRFHEEILPMFDRLQNNRKEWKALADEYEAKVKALEEKEEEERVAAKKVGTEICNGGPAPKSSTCCIL

SEQ ID NO: 145 - protein, 498 aa, Homo sapiens [sequence omitted]

SEQ ID NO: 146 - protein, 743 aa, Homo sapiens
  MISC_FEATURE (1)..(743): N-acetyl-alpha-glucosaminidase (NAGLU)
MEAVAVAAAVGVLLLAGAGGAAGDEAREAAAVRALVARLLGPGPAADFSVSVERALAAKPGLDTYSLGGGGAARVRVRGSTGVAAAAGLHRYLRDFCGCHVAWSGSQLRLPRPLPAVPGELTEATPNRYRYYQNVCTQSYSFVWWDWARWEREIDWMALNGINLALAWSGQEAIWQRVYLALGLTQAEINEFFTGPAFLAWGRMGNLHTWDGPLPPSWHIKQLYLQHRVLDQMRSFGMTPVLPAFAGHVPEAVTRVFPQVNVTKMGSWGHFNCSYSCSFLLAPEDPIFPIIGSLFLRELIKEFGTDHIYGADTFNEMQPPSSEPSYLAAATTAVYEAMTAVDTEAVWLLQGWLFQHQPQFWGPAQIRAVLGAVPRGRLLVLDLFAESQPVYTRTASFQGQPFIWCMLHNFGGNHGLFGALEAVNGGPEAARLFPNSTMVGTGMAPEGISQNEVVYSLMAELGWRKDPVPDLAAWVTSFAARRYGVSHPDAGAAWRLLLRSVYNCSGEACRGHNRSPLVRRPSLQMNTSIWYNRSDVFEAWRLLLTSAPSLATSPAFRYDLLDLTRQAVQELVSLYYEEARSAYLSKELASLLRAGGVLAYELLPALDEVLASDSRFLLGSWLEQARAAAVSEAEADFYEQNSRYQLTLWGPEGNILDYANKQLAGLVANYYTPRWRLFLEALVDSVAQGIPFQQHQFDKNVFQLEQAFVLSKQRYPSQPRGDTVDLAKKIFLKYYPGWVAGSW

SEQ ID NO: 147 - skipped

SEQ ID NO: 148 - protein, 429 aa, Homo sapiens; identical to SEQ ID NO: 11
  MISC_FEATURE (1)..(429): Alpha-Galactosidase A (GLA)

SEQ ID NO: 149 - protein, 458 aa, Artificial Sequence
  Codon optimized + GET, CO1-GLA-GET
MQLRNPELHLGCALALRFLALVSWDIPGARALDNGLARTPTMGWLHWERFMCNLDCQEEPDSCISEKLFMEMAELMVSEGWKDAGYEYLCIDDCWMAPQRDSEGRLQADPQRFPHGIRQLANYVHSKGLKLGIYADVGNKTCAGFPGSFGYYDIDAQTFADWGVDLLKFDGCYCDSLENLADGYKHMSLALNRTGRSIVYSCEWPLYMWPFQKPNYTEIRQYCNHWRNFADIDDSWKSIKSILDWTSFNQERIVDVAGPGGWNDPDMLVIGNFGLSWNQQVTQMALWAIMAAPLFMSNDLRHISPQAKALLQDKDVIAINQDPLGKQGYQLRQGDNFEVWERPLSGLAWAVAMINRQEIGGPRSYTIAVASLGKGVACNPACFITQLLPVKRKLGFYEWTSRLRSHINPTGTVLLQLENTMQMSLKDLLRRRRRRRRKRKKKGKGLGKKRDPCLRKYK

SEQ ID NO: 150 - protein, 1428 aa, Artificial Sequence; identical to SEQ ID NO: 95
  Codon optimized, Cystic Fibrosis Transmembrane Regulator deltaR (CFTRdeltaR) contains R domain deletion

SEQ ID NO: 151 - protein, 1480 aa, Artificial Sequence; identical to SEQ ID NO: 94
  Codon optimized, full length Cystic Fibrosis Transmembrane Regulator (CFTR)

SEQ ID NO: 152 - DNA, 250 bp, Artificial Sequence; identical to SEQ ID NO: 96
  Mouse U1a promoter

SEQ ID NO: 153 - DNA, 101 bp, Artificial Sequence; identical to SEQ ID NO: 97
  Polymerase III H1 mutant promoter

SEQ ID NO: 154 - DNA, 701 bp, Artificial Sequence
  Chicken beta-actin hybrid promoter CBh (CBh promoter consists of CMV enhancer, CBA promoter, first CBA exon and partial intron)
cgttacataacttacggtaaatggcccgcctggctgaccgcccaacgacccccgcccattgacgtcaatagtaacgccaatagggactttccattgacgtcaatgggtggagtatttacggtaaactgcccacttggcagtacatcaagtgtatcatatgccaagtacgccccctattgacgtcaatgacggtaaatggcccgcctggcattgtgcccagtacatgaccttatgggactttcctacttggcagtacatctacgtattagtcatcgctattaccatggtcgaggtgagccccacgttctgcttcactctccccatctcccccccctccccacccccaattttgtatttatttattttttaattattttgtgcagcgatgggggcggggggggggggggggcgcgcgccaggcggggcggggcggggcgaggggcggggcggggcgaggcggagaggtgcggcggcagccaatcagagcggcgcgctccgaaagtttccttttatggcgaggcggcggcggcggcggccctataaaaagcgaagcgcgcggcgggcgggagtcgctgcgcgctgccttcgccccgtgccccgctccgccgccgcctcgcgccgcccgccccggctctgactgaccgcgttactcccacaggtgagcgggcgggacggcccttctcctccgggctgtaattagc

SEQ ID NO: 155 - DNA, 229 bp, Artificial Sequence
  MeCP2 min promoter sequence
agctgaatggggtccgcctcttttccctgcctaaacagacaggaactcctgccaattgagggcgtcaccgctaaggctccgccccagcctgggctccacaaccaatgaagggtaatctcgacaaagagcaaggggtggggcgcgggcgcgcaggtgcagcagcacacaggctggtcgggagggcggggcgcgacgtctgccgtgcggggtcccggcatcggttgcgcgc

SEQ ID NO: 156 - DNA, 737 bp, Artificial Sequence
  MeCP2 promoter sequence
tcaaaccatctgattcaacaatgcacgaccgatctcttatgggcttggcacacaccatctgcccattataaacgtctgcaaagaccaaggtttgatatgttgattttactgtcagccttaagagtgcgacatctgctaatttagtgtaataatacaatcagtagaccctttaaaacaagtcccttggcttggaacaacgccaggctcctcaacaggcaactttgctacttctacagaaaatgataataaagaaatgctggtgaagtcaaatgcttatcacaatggtgaactactcagcagggaggctctaataggcgccaagagcctagacttccttaagcgccagagtccacaagggcccagttaatcctcaacattcaaatgctgcccacaaaaccagcccctctgtgccctagccgcctcttttttccaagtgacagtagaactccaccaatccgcagctgaatggggtccgcctcttttccctgcctaaacagacaggaactcctgccaattgagggcgtcaccgctaaggctccgccccagcctgggctccacaaccaatgaagggtaatctcgacaaagagcaaggggtggggcgcgggcgcgcaggtgcagcagcacacaggctggtcgggagggcggggcgcgacgtctgccgtgcggggtcccggcatcggttgcgcgcgcgctccctcctctcggagagagggctgtggtaaaacccgtccggaaaa

SEQ ID NO: 157 - DNA, 418 bp, Artificial Sequence
  MeCP418 promoter sequence
ataggcgccaagagcctagacttccttaagcgccagagtccacaagggcccagttaatcctcaacattcaaatgctgcccacaaaaccagcccctctgtgccctagccgcctcttttttccaagtgacagtagaactccaccaatccgcagctgaatggggtccgcctcttttccctgcctaaacagacaggaactcctgccaattgagggcgtcaccgctaaggctccgccccagcctgggctccacaaccaatgaagggtaatctcgacaaagagcaaggggtggggcgcgggcgcgcaggtgcagcagcacacaggctggtcgggagggcggggcgcgacgtctgccgtgcggggtcccggcatcggttgcgcgcgcgctccctcctctcggagagagggctgtggtaaaacccg

SEQ ID NO: 158 - DNA, 426 bp, Artificial Sequence
  MeCP426 promoter sequence
ataggcgccaagagcctagacttccttaagcgccagagtccacaagggcccagttaatcctcaacattcaaatgctgcccacaaaaccagcccctctgtgccctagccgcctcttttttccaagtgacagtagaactccaccaatccgcagctgaatggggtccgcctcttttccctgcctaaacagacaggaactcctgccaattgagggcgtcaccgctaaggctccgccccagcctgggctccacaaccaatgaagggtaatctcgacaaagagcaaggggtggggcgcgggcgcgcaggtgcagcagcacacaggctggtcgggagggcggggcgcgacgtctgccgtgcggggtcccggcatcggttgcgcgcgcgctccctcctctcggagagagggctgtggtaaaacccgtccggaaa

SEQ ID NO: 159 - DNA, 400 bp, Artificial Sequence
  VMD2 promoter
aattctgtcattttactagggtgatgaaattcccaagcaacaccatccttttcagataagggcactgaggctgagagaggagctgaaacctacccggggtcaccacacacaggtggcaaggctgggaccagaaaccaggactgttgactctggattttagggccatggtagagggggtgttgccctaaattccagccctggtctcagcccaacaccctccaagaagaaattagaggggccatggccaggctgtgctagccgttgcttctgagcagattacaagaagggactaagacaaggactcctttgtggaggtcctggcttagggagtcaagtgacggcggctcagcactcacgtgggcagtgccagcctctaagagtgggcaggggcactggccac

SEQ ID NO: 160 - DNA, 136 bp, Artificial Sequence
  PDE6b promoter
cccatttgtaggagtgagtcagctgacccgcccccggggttcctaatctcactaagaaagactttgctgatgacagggtttcctgggagtccatgcgtgcctggagcagcagcgtctccagggacaggcagccacc

SEQ ID NO: 161 - DNA, 2035 bp, Artificial Sequence
  mRho promoter
gcgccaatcagccgatgacttctaacaatactcttaactcacacagagcttgtctcactgagccaacaccctgtaccctcagctcagtgacggctttcaacctgtggggctgcctctgttacccaagtgagagagggccagtgctcccagaggtgaccttgtttgcccattctctccctgggtcagccagtgtttatctgttgtatacccagtccaccctgcaggctcacatcagagcctaggagatggctagtgtccccgcggagaccacgatgaagcttcccagctgtctcaagcacaagctggctgcagaggctgctgaggcactgctagctggggatgggggcagggtagatctggggctgaccaccagggtcagaatcagaacctccaccttgacctcattaacgctggtcttaatcaccaagccaagctccttaaactgctagtggccaactcccaggccctgacacacatacctgccctgtgttcccaaacaagacacctgcatggaaggaagggggttgcttttctaagcaaacatctaggaatcccgggtgcagtgtgaggagactaggcgagggagtactttaagggcctcaaggctcagagaggaatacttcttccctggttagcctcgtgcctaggctccagggtctttgtcctgcctggatacctatgtggcaaggggcatagcatttcccccaccatcagctcttagctcaaccttatcttctcggaaagactgcgcagtgtaacaacacagcagagacttttcttttgtcccctgtctacccctgtaactgctactcagaagcatctttctcacagggtactggcttcttgcatccagagttttttgtctccctcgggcccccagaatcaaattcttcctctgggactcagtggatgtttcacacacgtatcggcctgacagtcatcctggagcatcctacacaggggccatcacagctgcatgtcagaaatgctggcctcacatcctcagacaccaggcctagtgctggtcttcctcagactggcgtccccagcaggccagtaggatcatcttttagcctacagagttctgaagcctcagagccccaggtccctggtcatcttctctgcccctgagatttttccaagttgtatgccttctaggtaaggcaaaacttcttacgcccctcctcgtggcctccaggccccacatgctcacctgaataacctggcagcctgctccctcatgcagggaccacgtcctgctgcacccagcaggccatcccgtctccatagcccatggtcatccctccctggacaggaatgtgtctcctccccgggctgagtcttgctcaagctagaagcactccgaacagggttatgggcgcctcctccatctcccaagtggctggcttatgaatgtttaatgtacatgtgagtgaacaaattccaattgaacgcaacaaatagttatcgagccgctgagccggggggcggggggtgtgagactggaggcgatggacggagctgacggcacacacagctcagatctgtcaagtgagccattgtcagggcttggggactggataagtcagggggtctcctgggaagagatgggataggtgagttcaggaggagacattgtcaactggagccatgtggagaagtgaatttagggcccaaaggttccagtcgcagcctgaggccaccagactgacatggggaggaattcccagaggactctggggcagacaagatgagacaccctttcctttctttacctaagggcctccacccgatgtcaccttggcccctctgcaagccaattaggccccggtggcagcagtgggattagcgttagtatgatatctcgcggatgctgaatcagcctctggcttagggagagaaggtcactttataagggtctggggggggtcagtgcctggagttgcgctgtgggagccgtcagtggctgagctcgccaagcagccttggtctctgtctacgaagagcccgtggggcagcctcgagagccgcagcc

SEQ ID NO: 162 - DNA, 511 bp, Artificial Sequence
  CMV promoter
ccgttacataacttacggtaaatggcccgcctggctgaccgcccaacgacccccgcccattgacgtcaatagtaacgccaatagggactttccattgacgtcaatgggtggagtatttacggtaaactgcccacttggcagtacatcaagtgtatcatatgccaagtacgccccctattgacgtcaatgacggtaaatggcccgcctggcattgtgcccagtacatgaccttatgggactttcctacttggcagtacatctacgtattagtcatcgctattaccatggtgatgcggttttggcagtacatcaatgggcgtggatagcggtttgactcacggggatttccaagtctccaccccattgacgtcaatgggagtttgttttggcaccaaaatcaacgggactttccaaaatgtcgtaacaactccgccccattgacgcaaatgggcggtaggcgtgtacggtgggaggtctatataagcagagctcgtttagtgaaccgtcagat

SEQ ID NO: 163 - DNA, 334 bp, Artificial Sequence
  UbC promoter
ggcctccgcgccgggttttggcgcctcccgcgggcgcccccctcctcacggcgagcgctgccacgtcagacgaagggcgcagcgagcgtcctgatccttccgcccggacgctcaggacagcggcccgctgctcataagactcggccttagaaccccagtatcagcagaaggacattttaggacgggacttgggtgactctagggcactggttttctttccagagagcggaacaggcgaggaaaagtagtcccttctcggcgattctgcggagggatctccgtggggcggtgaacgccgatgattatataaggacgcgccgggtgtggcacagct

SEQ ID NO: 164 - protein, 342 aa, Artificial Sequence
  Cre recombinase
SNLLTVHQNLPALPVDATSDEVRKNLMDMFRDRQAFSEHTWKMLQSVCRSWAAWCKLNNRKWFPAEPEDVRDYLLYLQARGLAVKTIQQHLGQLNMLHRRSGLPRPSDSNAVSLVMRRIRKENVDAGERAKQALAFERTDFDQVRSLMENSDRCQDIRNLAFLGIAYNTLLRIAEIARIRVKDISRTDGGRMLIHIGRTKTLVSTAGVEKALSLGVTKLVERWISVSGVADDPNNYLFCRVRKNGVAAPSATSQLSTRALEGIFEATHRLIYGAKDDSGQRYLAWSGHSARVGAARDMARAGVSIPEIMQAGGWTNVNIVMNYIRNLDSETGAMVRLLEDGD

SEQ ID NO: 165 - protein, 7 aa, Artificial Sequence
  NLS
PKKKRKV

SEQ ID NO: 166 - protein, 349 aa, Artificial Sequence
  Cre with NLS
PKKKRKVSNLLTVHQNLPALPVDATSDEVRKNLMDMFRDRQAFSEHTWKMLQSVCRSWAAWCKLNNRKWFPAEPEDVRDYLLYLQARGLAVKTIQQHLGQLNMLHRRSGLPRPSDSNAVSLVMRRIRKENVDAGERAKQALAFERTDFDQVRSLMENSDRCQDIRNLAFLGIAYNTLLRIAEIARIRVKDISRTDGGRMLIHIGRTKTLVSTAGVEKALSLGVTKLVERWISVSGVADDPNNYLFCRVRKNGVAAPSATSQLSTRALEGIFEATHRLIYGAKDDSGQRYLAWSGHSARVGAARDMARAGVSIPEIMQAGGWTNVNIVMNYIRNLDSETGAMVRLLEDGD

SEQ ID NO: 167 - DNA, 1050 bp, Artificial Sequence
  Cre with NLS
cccaagaagaagaggaaggtgtccaatttactgaccgtacaccaaaatttgcctgcactgccggtcgatgcaacgagtgatgaggttcgcaagaacctgatggacatgttcagggatcgccaggcgttttctgagcatacctggaaaatgcttcagtccgtttgccggtcgtgggcggcatggtgcaagttgaataaccggaaatggtttcccgcagaacctgaagatgttcgcgattatcttctatatcttcaggcgcgcggtctggcagtaaaaactatccagcaacatttgggccagctaaacatgcttcatcgtcggtccgggctgccacgaccaagtgacagcaatgctgtttcactggttatgcggcggatccgaaaagaaaacgttgatgccggtgaacgtgcaaaacaggctctagcgttcgaacgcactgatttcgaccaggttcgttcactcatggaaaatagcgatcgctgccaggatatacgtaatctggcatttctggggattgcttataacaccctgttacgtatagccgaaattgccaggatcagggttaaagatatctcacgtactgacggtgggagaatgttaatccatattggcagaacgaaaacgctggttagcaccgcaggtgtagagaaggcacttagcctaggggtaactaaactggtcgagcgatggatttccgtctctggtgtagctgatgatccgaataactacctgttttgccgggtcagaaaaaatggtgttgccgcgccatctgccaccagccagctatcaactcgcgccctggaagggatttttgaagcaactcatcgattgatttacggcgctaaggatgactctggtcagagatacctggcctggtctggacacagtgcccgtgtcggagccgcgcgagatatggcccgcgctggagtttcaataccggagatcatgcaagctggtggctggaccaatgtaaatattgtcatgaactatatccgtaacctggatagtgaaacaggggcaatggtgcgcctgctcgaggatggcgattaa

SEQ ID NO: 168 - DNA, 34 bp, Artificial Sequence
  LoxP wildtype
ataacttcgtataatgtatgctatacgaagttat

SEQ ID NO: 169 - DNA, 34 bp, Artificial Sequence
  Lox 511
ataacttcgtataatgtatactatacgaagttat

SEQ ID NO: 170 - DNA, 34 bp, Artificial Sequence
  Lox 5171
ataacttcgtataatgtgtactatacgaagttat

SEQ ID NO: 171 - DNA, 34 bp, Artificial Sequence
  Lox 2272
ataacttcgtataaagtatcctatacgaagttat

SEQ ID NO: 172 - DNA, 34 bp, Artificial Sequence
  M2
ataacttcgtataagaaaccatatacgaagttat

SEQ ID NO: 173 - DNA, 34 bp, Artificial Sequence
  M3
ataacttcgtatataataccatatacgaagttat

SEQ ID NO: 174 - DNA, 34 bp, Artificial Sequence
  M7
ataacttcgtataagatagaatatacgaagttat

SEQ ID NO: 175 - DNA, 34 bp, Artificial Sequence
  M11
ataacttcgtatacgataccatatacgaagttat

SEQ ID NO: 176 - DNA, 34 bp, Artificial Sequence
  Lox 71
  misc_feature (14)..(16): n is a, c, g, or t
  misc_feature (19)..(21): n is a, c, g, or t
taccgttcgtatannntannntatacgaagttat

SEQ ID NO: 177 - DNA, 34 bp, Artificial Sequence
  Lox 66
  misc_feature (14)..(16): n is a, c, g, or t
  misc_feature (19)..(21): n is a, c, g, or t
ataacttcgtatannntannntatacgaacggta

SEQ ID NO: 178 - DNA, 34 bp, Artificial Sequence
  Lox 71
taccgttcgtataatgtatgctatacgaagttat

SEQ ID NO: 179 - DNA, 34 bp, Artificial Sequence
  Lox 66
ataacttcgtataatgtatgctatacgaacggta

SEQ ID NO: 180 - protein, 18 aa, Artificial Sequence
  T2A
EGRGSLLTCGDVEENPGP

SEQ ID NO: 181 - protein, 19 aa, Artificial Sequence
  P2A
ATNFSLLKQAGDVEENPGP

SEQ ID NO: 182 - protein, 20 aa, Artificial Sequence
  E2A
QCTNYALLKLAGDVESNPGP

SEQ ID NO: 183 - protein, 22 aa, Artificial Sequence
  F2A
VKQTLNFDLLKLAGDVESNPGP

SEQ ID NO: 184 - protein, 22 aa, Artificial Sequence
  P2A
GSGATNFSLLKQAGDVEENPGP

SEQ ID NO: 185 - DNA, 66 bp, Artificial Sequence
  P2A
ggaagcggagctactaacttcagcctgctgaagcaggctggagacgtggaggagaaccctggaccc

SEQ ID NO: 186 - DNA, 82 bp, Artificial Sequence
  Splice Donor
gtaagtatcaaggttacaagacaggtttaaggagaccaatagaaactgggcttgtcgagacagagaagactcttgcgtttct

SEQ ID NO: 187 - DNA, 51 bp, Artificial Sequence
  Splice Acceptor
gataggcacctattggtcttactgacatccactttgcctttctctccacag

SEQ ID NO: 188 - DNA, 295 bp, Homo sapiens
gggccccagaagcctggtggttgtttgtccttctcaggggaaaagtgaggcggccccttggaggaaggggccgggcagaatgatctaatcggattccaagcagctcaggggattgtctttttctagcaccttcttgccactcctaagcgtcctccgtgaccccggctgggatttagcctggtgctgtgtcagccccgggctcccaggggcttcccagtggtccccaggaaccctcgacagggccagggcgtctctctcgtccagcaagggcagggacgggccacaggccaagggc

SEQ ID NO: 189 - DNA, 49 bp, Homo sapiens
aaataaatatctttattttcattacatctgtgtgttggttttttgtgtg

SEQ ID NO: 190 - protein, 2273 aa, Homo sapiens [sequence omitted]

SEQ ID NO: 191 - DNA, 6822 bp, Homo sapiens
atgggcttcgtgagacagatacagcttttgctctggaagaactggaccctgcggaaaaggcaaaagattcgctttgtggtggaactcgtgtggcctttatctttatttctggtcttgatctggttaaggaatgccaacccactctacagccatcatgaatgccatttccccaacaaggcgatgccctcagcaggaatgctgccgtggctccaggggatcttctgcaatgtgaacaatccctgttttcaaagccccaccccaggagaatctcctggaattgtgtcaaactataacaactccatcttggcaagggtatatcgagattttcaagaactcctcatgaatgcaccagagagccagcaccttggccgtatttggacagagctacacatcttgtcccaattcatggacaccctccggactcacccggagagaattgcaggaagaggaatacgaataagggatatcttgaaagatgaagaaacactgacactatttctcattaaaaacatcggcctgtctgactcagtggtctaccttctgatcaactctcaagtccgtccagagcagttcgctcatggagtcccggacctggcgctgaaggacatcgcctgcagcgaggccctcctggagcgcttcatcatcttcagccagagacgcggggcaaagacggtgcgctatgccctgtgctccctctcccagggcaccctacagtggatagaagacactctgtatgccaacgtggacttcttcaagctcttccgtgtgcttcccacactcctagacagccgttctcaaggtatcaatctgagatcttggggaggaatattatctgatatgtcaccaagaattcaagagtttatccatcggccgagtatgcaggacttgctgtgggtgaccaggcccctcatgcagaatggtggtccagagacctttacaaagctgatgggcatcctgtctgacctcctgtgtggctaccccgagggaggtggctctcgggtgctctccttcaactggtatgaagacaataactataaggcctttctggggattgactccacaaggaaggatcctatctattcttatgacagaagaacaacatccttttgtaatgcattgatccagagcctggagtcaaatcctttaaccaaaatcgcttggagggcggcaaagcctttgctgatgggaaaaatcctgtacactcctgattcacctgcagcacgaaggatactgaagaatgccaactcaacttttgaagaactggaacacgttaggaagttggtcaaagcctgggaagaagtagggccccagatctggtacttctttgacaacagcacacagatgaacatgatcagagataccctggggaacccaacagtaaaagactttttgaataggcagcttggtgaagaaggtattactgctgaagccatcctaaacttcctctacaagggccctcgggaaagccaggctgacgacatggccaacttcgactggagggacatatttaacatcactgatcgcaccctccgcctggtcaatcaatacctggagtgcttggtcctggataagtttgaaagctacaatgatgaaactcagctcacccaacgtgccctctctctactggaggaaaacatgttctgggccggagtggtattccctgacatgtatccctggaccagctctctaccaccccacgtgaagtataagatccgaatggacatagacgtggtggagaaaaccaataagattaaagacaggtattgggattctggtcccagagctgatcccgtggaagatttccggtacatctggggcgggtttgcctatctgcaggacatggttgaacaggggatcacaaggagccaggtgcaggcggaggctccagttggaatctacctccagcagatgccctacccctgcttcgtggacgattctttcatgatcatcctgaaccgctgtttccctatcttcatggtgctggcatggatctactctgtctccatgactgtgaagagcatcgtcttggagaaggagttgcgactgaaggagaccttgaaaaatcagggtgtctccaatgcagtgatttggtgtacctggttcctggacagcttctccatcatgtcgatgagcatcttcctcctgacgatattcatcatgcatggaagaatcctacattacagcgacccattcatcctcttcctgttcttgttggctttctccactgccaccatcatgctgtgctttctgctcagcaccttcttctccaaggccagtctggcagcagcctgtagtggtgtcatctatttcaccctctacctgccacacatcctgtgcttcgcctggcaggaccgcatgaccgctgagctgaagaaggctgtgagcttactgtctccggtggcatttggatttggcactgagtacctggttcgctttgaagagcaaggcctggggctgcagtggagcaacatcgggaacagtcccacggaaggggacgaattcagcttcctgctgtccatgcagatgatgctccttgatgctgctgtctatggcttactcgcttggtaccttgatcaggtgtttccaggagactatggaaccccacttccttggtactttcttctacaagagtcgtattggcttggcggtgaaggttgttcaaccagagaagaaagagccctggaaaagaccgagcccctaacagaggaaacggaggatccagagcacccagaaggaatacacgactccttctttgaacgtgagcatccagggtgggttcctggggtatgcgtgaagaatctggtaaagatttttgagccctgtggccggccagctgtggaccgtctgaacatcaccttctacgagaaccagatcaccgcattcctgggccacaatggagctgggaaaaccaccaccttgtccatcctgacgggtctgttgccaccaacctctgggactgtgctcgttgggggaagggacattgaaaccagcctggatgcagtccggcagagccttggcatgtgtccacagcacaacatcctgttccaccacctcacggtggctgagcacatgctgttctatgcccagctgaaaggaaagtcccaggaggaggcccagctggagatggaagccatgttggaggacacaggcctccaccacaagcggaatgaagaggctcaggacctatcaggtggcatgcagagaaagctgtcggttgccattgcctttgtgggagatgccaaggtggtgattctggacgaacccacctctggggtggacccttactcgagacgctcaatctgggatctgctcctgaagtatcgctcaggcagaaccatcatcatgtccactcaccacatggacgaggccgacctccttggggaccgcattgccatcattgcccagggaaggctctactgctcaggcaccccactcttcctgaagaactgctttggcacaggcttgtacttaaccttggtgcgcaagatgaaaaacatccagagccaaaggaaaggcagtgaggggacctgcagctgctcgtctaagggtttctccaccacgtgtccagcccacgtcgatgacctaactccagaacaagtcctggatggggatgtaaatgagctgatggatgtagttctccaccatgttccagaggcaaagctggtggagtgcattggtcaagaacttatcttccttcttccaaataagaacttcaagcacagagcatatgccagccttttcagagagctggaggagacgctggctgaccttggtctcagcagttttggaatttctgacactcccctggaagagatttttctgaaggtcacggaggattctgattcaggacctctgtttgcgggtggcgctcagcagaaaagagaaaacgtcaacccccgacacccctgcttgggtcccagagagaaggctggacagacaccccaggactccaatgtctgctccccaggggcgccggctgctcacccagagggccagcctcccccagagccagagtgcccaggcccgcagctcaacacggggacacagctggtcctccagcatgtgcaggcgctgctggtcaagagattccaacacaccatccgcagccacaaggacttcctggcgcagatcgtgctcccggctacctttgtgtttttggctctgatgctttctattgttatccctccttttggcgaataccccgctttgacccttcacccctggatatatgggcagcagtacaccttcttcagcatggatgaaccaggcagtgagcagttcacggtacttgcagacgtcctcctgaataagccaggctttggcaaccgctgcctgaaggaagggtggcttccggagtacccctgtggcaactcaacaccctggaagactccttctgtgtccccaaacatcacccagctgttccagaagcagaaatggacacaggtcaacccttcaccatcctgcaggtgcagcaccagggagaagctcaccatgctgccagagtgccccgagggtgccgggggcctcccgcccccccagagaacacagcgcagcacggaaattctacaagacctgacggacaggaacatctccgacttcttggtaaaaacgtatcctgctcttataagaagcagcttaaagagcaaattctgggtcaatgaacagaggtatggaggaatttccattggaggaaagctcccagtcgtccccatcacgggggaagcacttgttgggtttttaagcgaccttggccggatcatgaatgtgagcgggggccctatcactagagaggcctctaaagaaatacctgatttccttaaacatctagaaactgaagacaacattaaggtgtggtttaataacaaaggctggcatgccctggtcagctttctcaatgtggcccacaacgccatcttacgggccagcctgcctaaggacaggagccccgaggagtatggaatcaccgtcattagccaacccctgaacctgaccaaggagcagctctcagagattacagtgctgaccacttcagtggatgctgtggttgccatctgcgtgattttctccatgtccttcgtcccagccagctttgtcctttatttgatccaggagcgggtgaacaaatccaagcacctccagtttatcagtggagtgagccccaccacctactgggtgaccaacttcctctgggacatcatgaattattccgtgagtgctgggctggtggtgggcatcttcatcgggtttcagaagaaagcctacacttctccagaaaaccttcctgcccttgtggcactgctcctgctgtatggatgggcggtcattcccatgatgtacccagcatccttcctgtttgatgtccccagcacagcctatgtggctttatcttgtgctaatctgttcatcggcatcaacagcagtgctattaccttcatcttggaattatttgagaataaccggacgctgctcaggttcaacgccgtgctgaggaagctgctcattgtcttcccccacttctgcctgggccggggcctcattgaccttgcactgagccaggctgtgacagatgtctatgcccggtttggtgaggagcactctgcaaatccgttccactgggacctgattgggaagaacctgtttgccatggtggtggaaggggtggtgtacttcctcctgaccctgctggtccagcgccacttcttcctctcccaatggattgccgagcccactaaggagcccattgttgatgaagatgatgatgtggctgaagaaagacaaagaattattactggtggaaataaaactgacatcttaaggctacatgaactaaccaagatttatccaggcacctccagcccagcagtggacaggctgtgtgtcggagttcgccctggagagtgctttggcctcctgggagtgaatggtgccggcaaaacaaccacattcaagatgctcactggggacaccacagtgacctcaggggatgccaccgtagcaggcaagagtattttaaccaatatttctgaagtccatcaaaatatgggctactgtcctcagtttgatgcaattgatgagctgctcacaggacgagaacatctttacctttatgcccggcttcgaggtgtaccagcagaagaaatcgaaaaggttgcaaactggagtattaagagcctgggcctgactgtctacgccgactgcctggctggcacgtacagtgggggcaacaagcggaaactctccacagccatcgcactcattggctgcccaccgctggtgctgctggatgagcccaccacagggatggacccccaggcacgccgcatgctgtggaacgtcatcgtgagcatcatcagagaagggagggctgtggtcctcacatcccacagcatggaagaatgtgaggcactgtgtacccggctggccatcatggtaaagggcgcctttcgatgtatgggcaccattcagcatctcaagtccaaatttggagatggctatatcgtcacaatgaagatcaaatccccgaaggacgacctgcttcctgacctgaaccctgtggagcagttcttccaggggaacttcccaggcagtgtgcagagggagaggcactacaacatgctccagttccaggtctcctcctcctccctggcgaggatcttccagctcctcctctcccacaaggacagcctgctcatcgaggagtactcagtcacacagaccacactggaccaggtgtttgtaaattttgctaaacagcagactgaaagccatgacctccctctgcaccctcgagctgctggagccagtcgacaagcccaggactaa

SEQ ID NO: 192 - DNA, 2653 bp, Homo sapiens
atgggcttcgtgagacagatacagcttttgctctggaagaactggaccctgcggaaaaggcaaaagattcgctttgtggtggaactcgtgtggcctttatctttatttctggtcttgatctggttaaggaatgccaacccactctacagccatcatgaatgccatttccccaacaaggcgatgccctcagcaggaatgctgccgtggctccaggggatcttctgcaatgtgaacaatccctgttttcaaagccccaccccaggagaatctcctggaattgtgtcaaactataacaactccatcttggcaagggtatatcgagattttcaagaactcctcatgaatgcaccagagagccagcaccttggccgtatttggacagagctacacatcttgtcccaattcatggacaccctccggactcacccggagagaattgcaggaagaggaatacgaataagggatatcttgaaagatgaagaaacactgacactatttctcattaaaaacatcggcctgtctgactcagtggtctaccttctgatcaactctcaagtccgtccagagcagttcgctcatggagtcccggacctggcgctgaaggacatcgcctgcagcgaggccctcctggagcgcttcatcatcttcagccagagacgcggggcaaagacggtgcgctatgccctgtgctccctctcccagggcaccctacagtggatagaagacactctgtatgccaacgtggacttcttcaagctcttccgtgtgcttcccacactcctagacagccgttctcaaggtatcaatctgagatcttggggaggaatattatctgatatgtcaccaagaattcaagagtttatccatcggccgagtatgcaggacttgctgtgggtgaccaggcccctcatgcagaatggtggtccagagacctttacaaagctgatgggcatcctgtctgacctcctgtgtggctaccccgagggaggtggctctcgggtgctctccttcaactggtatgaagacaataactataaggcctttctggggattgactccacaaggaaggatcctatctattcttatgacagaagaacaacatccttttgtaatgcattgatccagagcctggagtcaaatcctttaaccaaaatcgcttggagggcggcaaagcctttgctgatgggaaaaatcctgtacactcctgattcacctgcagcacgaaggatactgaagaatgccaactcaacttttgaagaactggaacacgttaggaagttggtcaaagcctgggaagaagtagggccccagatctggtacttctttgacaacagcacacagatgaacatgatcagagataccctggggaacccaacagtaaaagactttttgaataggcagcttggtgaagaaggtattactgctgaagccatcctaaacttcctctacaagggccctcgggaaagccaggctgacgacatggccaacttcgactggagggacatatttaacatcactgatcgcaccctccgcctggtcaatcaatacctggagtgcttggtcctggataagtttgaaagctacaatgatgaaactcagctcacccaacgtgccctctctctactggaggaaaacatgttctgggccggagtggtattccctgacatgtatccctggaccagctctctaccaccccacgtgaagtataagatccgaatggacatagacgtggtggagaaaaccaataagattaaagacaggtattgggattctggtcccagagctgatcccgtggaagatttccggtacatctggggcgggtttgcctatctgcaggacatggttgaacaggggatcacaaggagccaggtgcaggcggaggctccagttggaatctacctccagcagatgccctacccctgcttcgtggacgattctttcatgatcatcctgaaccgctgtttccctatcttcatggtgctggcatggatctactctgtctccatgactgtgaagagcatcgtcttggagaaggagttgcgactgaaggagaccttgaaaaatcagggtgtctccaatgcagtgatttggtgtacctggttcctggacagcttctccatcatgtcgatgagcatcttcctcctgacgatattcatcatgcatggaagaatcctacattacagcgacccattcatcctcttcctgttcttgttggctttctccactgccaccatcatgctgtgctttctgctcagcaccttcttctccaaggccagtctggcagcagcctgtagtggtgtcatctatttcaccctctacctgccacacatcctgtgcttcgcctggcaggaccgcatgaccgctgagctgaagaaggctgtgagcttactgtctccggtggcatttggatttggcactgagtacctggttcgctttgaagagcaaggcctggggctgcagtggagcaacatcgggaacagtcccacggaaggggacgaattcagcttcctgctgtccatgcagatgatgctccttgatgctgctgtctatggcttactcgcttggtaccttgatcaggtgtttccaggagactatggaaccccacttccttggtactttcttctacaagagtcgtattggcttggcggtgaag

SEQ ID NO: 193 - DNA, 4169 bp, Homo sapiens
gttgttcaaccagagaagaaagagccctggaaaagaccgagcccctaacagaggaaacggaggatccagagcacccagaaggaatacacgactccttctttgaacgtgagcatccagggtgggttcctggggtatgcgtgaagaatctggtaaagatttttgagccctgtggccggccagctgtggaccgtctgaacatcaccttctacgagaaccagatcaccgcattcctgggccacaatggagctgggaaaaccaccaccttgtccatcctgacgggtctgttgccaccaacctctgggactgtgctcgttgggggaagggacattgaaaccagcctggatgcagtccggcagagccttggcatgtgtccacagcacaacatcctgttccaccacctcacggtggctgagcacatgctgttctatgcccagctgaaaggaaagtcccaggaggaggcccagctggagatggaagccatgttggaggacacaggcctccaccacaagcggaatgaagaggctcaggacctatcaggtggcatgcagagaaagctgtcggttgccattgcctttgtgggagatgccaaggtggtgattctggacgaacccacctctggggtggacccttactcgagacgctcaatctgggatctgctcctgaagtatcgctcaggcagaaccatcatcatgtccactcaccacatggacgaggccgacctccttggggaccgcattgccatcattgcccagggaaggctctactgctcaggcaccccactcttcctgaagaactgctttggcacaggcttgtacttaaccttggtgcgcaagatgaaaaacatccagagccaaaggaaaggcagtgaggggacctgcagctgctcgtctaagggtttctccaccacgtgtccagcccacgtcgatgacctaactccagaacaagtcctggatggggatgtaaatgagctgatggatgtagttctccaccatgttccagaggcaaagctggtggagtgcattggtcaagaacttatcttccttcttccaaataagaacttcaagcacagagcatatgccagccttttcagagagctggaggagacgctggctgaccttggtctcagcagttttggaatttctgacactcccctggaagagatttttctgaaggtcacggaggattctgattcaggacctctgtttgcgggtggcgctcagcagaaaagagaaaacgtcaacccccgacacccctgcttgggtcccagagagaaggctggacagacaccccaggactccaatgtctgctccccaggggcgccggctgctcacccagagggccagcctcccccagagccagagtgcccaggcccgcagctcaacacggggacacagctggtcctccagcatgtgcaggcgctgctggtcaagagattccaacacaccatccgcagccacaaggacttcctggcgcagatcgtgctcccggctacctttgtgtttttggctctgatgctttctattgttatccctccttttggcgaataccccgctttgacccttcacccctggatatatgggcagcagtacaccttcttcagcatggatgaaccaggcagtgagcagttcacggtacttgcagacgtcctcctgaataagccaggctttggcaaccgctgcctgaaggaagggtggcttccggagtacccctgtggcaactcaacaccctggaagactccttctgtgtccccaaacatcacccagctgttccagaagcagaaatggacacaggtcaacccttcaccatcctgcaggtgcagcaccagggagaagctcaccatgctgccagagtgccccgagggtgccgggggcctcccgcccccccagagaacacagcgcagcacggaaattctacaagacctgacggacaggaacatctccgacttcttggtaaaaacgtatcctgctcttataagaagcagcttaaagagcaaattctgggtcaatgaacagaggtatggaggaatttccattggaggaaagctcccagtcgtccccatcacgggggaagcacttgttgggtttttaagcgaccttggccggatcatgaatgtgagcgggggccctatcactagagaggcctctaaagaaatacctgatttccttaaacatctagaaactgaagacaacattaaggtgtggtttaataacaaaggctggcatgccctggtcagctttctcaatgtggcccacaacgccatcttacgggccagcctgcctaaggacaggagccccgaggagtatggaatcaccgtcattagccaacccctgaacctgaccaaggagcagctctcagagattacagtgctgaccacttcagtggatgctgtggttgccatctgcgtgattttctccatgtccttcgtcccagccagctttgtcctttatttgatccaggagcgggtgaacaaatccaagcacctccagtttatcagtggagtgagccccaccacctactgggtgaccaacttcctctgggacatcatgaattattccgtgagtgctgggctggtggtgggcatcttcatcgggtttcagaagaaagcctacacttctccagaaaaccttcctgcccttgtggcactgctcctgctgtatggatgggcggtcattcccatgatgtacccagcatccttcctgtttgatgtccccagcacagcctatgtggctttatcttgtgctaatctgttcatcggcatcaacagcagtgctattaccttcatcttggaattatttgagaataaccggacgctgctcaggttcaacgccgtgctgaggaagctgctcattgtcttcccccacttctgcctgggccggggcctcattgaccttgcactgagccaggctgtgacagatgtctatgcccggtttggtgaggagcactctgcaaatccgttccactgggacctgattgggaagaacctgtttgccatggtggtggaaggggtggtgtacttcctcctgaccctgctggtccagcgccacttcttcctctcccaatggattgccgagcccactaaggagcccattgttgatgaagatgatgatgtggctgaagaaagacaaagaattattactggtggaaataaaactgacatcttaaggctacatgaactaaccaagatttatccaggcacctccagcccagcagtggacaggctgtgtgtcggagttcgccctggagagtgctttggcctcctgggagtgaatggtgccggcaaaacaaccacattcaagatgctcactggggacaccacagtgacctcaggggatgccaccgtagcaggcaagagtattttaaccaatatttctgaagtccatcaaaatatgggctactgtcctcagtttgatgcaattgatgagctgctcacaggacgagaacatctttacctttatgcccggcttcgaggtgtaccagcagaagaaatcgaaaaggttgcaaactggagtattaagagcctgggcctgactgtctacgccgactgcctggctggcacgtacagtgggggcaacaagcggaaactctccacagccatcgcactcattggctgcccaccgctggtgctgctggatgagcccaccacagggatggacccccaggcacgccgcatgctgtggaacgtcatcgtgagcatcatcagagaagggagggctgtggtcctcacatcccacagcatggaagaatgtgaggcactgtgtacccggctggccatcatggtaaagggcgcctttcgatgtatgggcaccattcagcatctcaagtccaaatttggagatggctatatcgtcacaatgaagatcaaatccccgaaggacgacctgcttcctgacctgaaccctgtggagcagttcttccaggggaacttcccaggcagtgtgcagagggagaggcactacaacatgctccagttccaggtctcctcctcctccctggcgaggatcttccagctcctcctctcccacaaggacagcctgctcatcgaggagtactcagtcacacagaccacactggaccaggtgtttgtaaattttgctaaacagcagactgaaagccatgacctccctctgcaccctcgagctgctggagccagtcgacaagcccaggactaa

SEQ ID NO: 194 - protein, 2317 aa, Artificial Sequence
  ABCA4 with FLAG tag
MGFVRQIQLLLWKNWTLRKRQKIRFVVELVWPLSLFLVLIWLRNANPLYSHHECHFPNKAMPSAGMLPWLQGIFCNVNNPCFQSPTPGESPGIVSNYNNSILARVYRDFQELLMNAPESQHLGRIWTELHILSQFMDTLRTHPERIAGRGIRIRDILKDEETLTLFLIKNIGLSDSVVYLLINSQVRPEQFAHGVPDLALKDIACSEALLERFIIFSQRRGAKTVRYALCSLSQGTLQWIEDTLYANVDFFKLFRVLPTLLDSRSQGINLRSWGGILSDMSPRIQEFIHRPSMQDLLWVTRPLMQNGGPETFTKLMGILSDLLCGYPEGGGSRVLSFNWYEDNNYKAFLGIDSTRKDPIYSYDRRTTSFCNALIQSLESNPLTKIAWRAAKPLLMGKILYTPDSPAARRILKNANSTFEELEHVRKLVKAWEEVGPQIWYFFDNSTQMNMIRDTLGNPTVKDFLNRQLGEEGITAEAILNFLYKGPRESQADDMANFDWRDIFNITDRTLRLVNQYLECLVLDKFESYNDETQLTQRALSLLEENMFWAGVVFPDMYPWTSSLPPHVKYKIRMDIDVVEKTNKIKDRYWDDYKDHDGDYKDHDIDYKDDDDKSGPRADPVEDFRYIWGGFAYLQDMVEQGITRSQVQAEAPVGIYLQQMPYPCFVDDSFMIILNRCFPIFMVLAWIYSVSMTVKSIVLEKELRLKETLKNQGVSNAVIWCTWFLDSFSIMSMSIFLLTIFIMHGRILHYSDPFILFLFLLAFSTATIMLCFLLSTFFSKASLAAACSGVIYFTLYLPHILCFAWQDRMTAELKKAVSLLSPVAFGFGTEYLVRFEEQGLGLQWSNIGNSPTEGDEFSFLLSMQMMLLDAAVYGLLAWYLDQVFPGDYGTPLPWYFLLQESYWLGGEGCSTREERALEKTEPLTEETEDPEHPEGIHDSFFEREHPGWVPGVCVKNLVKIFEPCGRPAVDRLNITFYENQITAFLGHNGAGKTTTLSILTGLLPPTSGTVLVGGRDIETSLDAVRQSLGMCPQHNILFHHLTVAEHMLFYAQLKGKSQEEAQLEMEAMLEDTGLHHKRNEEAQDLSGGMQRKLSVAIAFVGDAKVVILDEPTSGVDPYSRRSIWDLLLKYRSGRTIIMSTHHMDEADLLGDRIAIIAQGRLYCSGTPLFLKNCFGTGLYLTLVRKMKNIQSQRKGSEGTCSCSSKGFSTTCPAHVDDLTPEQVLDGDVNELMDVVLHHVPEAKLVECIGQELIFLLPNKNFKHRAYASLFRELEETLADLGLSSFGISDTPLEEIFLKVTEDSDSGPLFAGGAQQKRENVNPRHPCLGPREKAGQTPQDSNVCSPGAPAAHPEGQPPPEPECPGPQLNTGTQLVLQHVQALLVKRFQHTIRSHKDFLAQIVLPATFVFLALMLSIVIPPFGEYPALTLHPWIYGQQYTFFSMDEPGSEQFTVLADVLLNKPGFGNRCLKEGWLPEYPCGNSTPWKTPSVSPNITQLFQKQKWTQVNPSPSCRCSTREKLTMLPECPEGAGGLPPPQRTQRSTEILQDLTDRNISDFLVKTYPALIRSSLKSKFWVNEQRYGGISIGGKLPVVPITGEALVGFLSDLGRIMNVSGGPITREASKEIPDFLKHLETEDNIKVWFNNKGWHALVSFLNVAHNAILRASLPKDRSPEEYGITVISQPLNLTKEQLSEITVLTTSVDAVVAICVIFSMSFVPASFVLYLIQERVNKSKHLQFISGVSPTTYWVTNFLWDIMNYSVSAGLVVGIFIGFQKKAYTSPENLPALVALLLLYGWAVIPMMYPASFLFDVPSTAYVALSCANLFIGINSSAITFILELFENNRTLLRFNAVLRKLLIVFPHFCLGRGLIDLALSQAVTDVYARFGEEHSANPFHWDLIGKNLFAMVVEGVVYFLLTLLVQRHFFLSQWIAEPTKEPIVDEDDDVAEERQRIITGGNKTDILRLHELTKIYPGTSSPAVDRLCVGVRPGECFGLLGVNGAGKTTTFKMLTGDTTVTSGDATVAGKSILTNISEVHQNMGYCPQFDAIDELLTGREHLYLYARLRGVPAEEIEKVANWSIKSLGLTVYADCLAGTYSGGNKRKLSTAIALIGCPPLVLLDEPTTGMDPQARRMLWNVIVSIIREGRAVVLTSHSMEECEALCTRLAIMVKGAFRCMGTIQHLKSKFGDGYIVTMKIKSPKDDLLPDLNPVEQFFQGNFPGSVQRERHYNMLQFQVSSSSLARIFQLLLSHKDSLLIEEYSVTQTTLDQVFVNFAKQQTESHDLPLHPRAAGASRQAQDDYKDHDGDYKDHDIDYKDDDDK

SEQ ID NO: 195 - DNA, 6954 bp, Artificial Sequence
  ABCA4 with FLAG tag
atgggcttcgtgagacagatacagcttttgctctggaagaactggaccctgcggaaaaggcaaaagattcgctttgtggtggaactcgtgtggcctttatctttatttctggtcttgatctggttaaggaatgccaacccactctacagccatcatgaatgccatttccccaacaaggcgatgccctcagcaggaatgctgccgtggctccaggggatcttctgcaatgtgaacaatccctgttttcaaagccccaccccaggagaatctcctggaattgtgtcaaactataacaactccatcttggcaagggtatatcgagattttcaagaactcctcatgaatgcaccagagagccagcaccttggccgtatttggacagagctacacatcttgtcccaattcatggacaccctccggactcacccggagagaattgcaggaagaggaatacgaataagggatatcttgaaagatgaagaaacactgacactatttctcattaaaaacatcggcctgtctgactcagtggtctaccttctgatcaactctcaagtccgtccagagcagttcgctcatggagtcccggacctggcgctgaaggacatcgcctgcagcgaggccctcctggagcgcttcatcatcttcagccagagacgcggggcaaagacggtgcgctatgccctgtgctccctctcccagggcaccctacagtggatagaagacactctgtatgccaacgtggacttcttcaagctcttccgtgtgcttcccacactcctagacagccgttctcaaggtatcaatctgagatcttggggaggaatattatctgatatgtcaccaagaattcaagagtttatccatcggccgagtatgcaggacttgctgtgggtgaccaggcccctcatgcagaatggtggtccagagacctttacaaagctgatgggcatcctgtctgacctcctgtgtggctaccccgagggaggtggctctcgggtgctctccttcaactggtatgaagacaataactataaggcctttctggggattgactccacaaggaaggatcctatctattcttatgacagaagaacaacatccttttgtaatgcattgatccagagcctggagtcaaatcctttaaccaaaatcgcttggagggcggcaaagcctttgctgatgggaaaaatcctgtacactcctgattcacctgcagcacgaaggatactgaagaatgccaactcaacttttgaagaactggaacacgttaggaagttggtcaaagcctgggaagaagtagggccccagatctggtacttctttgacaacagcacacagatgaacatgatcagagataccctggggaacccaacagtaaaagactttttgaataggcagcttggtgaagaaggtattactgctgaagccatcctaaacttcctctacaagggccctcgggaaagccaggctgacgacatggccaacttcgactggagggacatatttaacatcactgatcgcaccctccgcctggtcaatcaatacctggagtgcttggtcctggataagtttgaaagctacaatgatgaaactcagctcacccaacgtgccctctctctactggaggaaaacatgttctgggccggagtggtattccctgacatgtatccctggaccagctctctaccaccccacgtgaagtataagatccgaatggacatagacgtggtggagaaaaccaataagattaaagacaggtattgggatgactacaaagaccatgacggtgattataaagatcatgacatcgattacaaggatgacgatgacaagtctggtcccagagctgatcccgtggaagatttccggtacatctggggcgggtttgcctatctgcaggacatggttgaacaggggatcacaaggagccaggtgcaggcggaggctccagttggaatctacctccagcagatgccctacccctgcttcgtggacgattctttcatgatcatcctgaaccgctgtttccctatcttcatggtgctggcatggatctactctgtctccatgactgtgaagagcatcgtcttggagaaggagttgcgactgaaggagaccttgaaaaatcagggtgtctccaatgcagtgatttggtgtacctggttcctggacagcttctccatcatgtcgatgagcatcttcctcctgacgatattcatcatgcatggaagaatcctacattacagcgacccattcatcctcttcctgttcttgttggctttctccactgccaccatcatgctgtgctttctgctcagcaccttcttctccaaggcaagcttggcagcagcctgtagtggtgtcatctatttcaccctctacctgccacacatcctgtgcttcgcctggcaggaccgcatgaccgctgagctgaagaaggctgtgagcttactgtctccggtggcatttggatttggcactgagtacctggttcgctttgaagagcaaggcctggggctgcagtggagcaacatcgggaacagtcccacggaaggggacgaattcagcttcctgctgtccatgcagatgatgctccttgatgctgctgtctatggcttactcgcttggtatcttgatcaggtgtttccaggagactatggaaccccacttccttggtactttcttctacaagagtcgtattggcttggcggtgaaggttgttcaaccagagaagaaagagccctggaaaagaccgagcccctaacagaggaaacggaggatccagagcacccagaaggaatacacgactccttctttgaacgtgagcatccagggtgggttcctggggtatgcgtgaagaatctggtaaagatttttgagccctgtggccggccagctgtggaccgtctgaacatcaccttctacgagaaccagatcaccgcattcctgggccacaatggagctgggaaaaccaccaccttgtccatcctgacgggtctgttgccaccaacctctgggactgtgctcgttgggggaagggacattgaaaccagcctggatgcagtccggcagagccttggcatgtgtccacagcacaacatcctgttccaccacctcacggtggctgagcacatgctgttctatgcccagctgaaaggaaagtcccaggaggaggcccagctggagatggaagccatgttggaggacacaggcctccaccacaagcggaatgaagaggctcaggacctatcaggtggcatgcagagaaagctgtcggttgccattgcctttgtgggagatgccaaggtggtgattctggacgaacccacctctggggtggacccttactcgagacgctcaatctgggatctgctcctgaagtatcgctcaggcagaaccatcatcatgtccactcaccacatggacgaggccgacctccttggggaccgcattgccatcattgcccagggaaggctctactgctcaggcaccccactcttcctgaagaactgctttggcacaggcttgtacttaaccttggtgcgcaagatgaaaaacatccagagccaaaggaaaggcagtgaggggacctgcagctgctcgtctaagggtttctccaccacgtgtccagcccacgtcgatgacctaactccagaacaagtcctggatggggatgtaaatgagctgatggatgtagttctccaccatgttccagaggcaaagctggtggagtgcattggtcaagaacttatcttccttcttccaaataagaacttcaagcacagagcatatgccagccttttcagagagctggaggagacgctggctgaccttggtctcagcagttttggaatttctgacactcccctggaagagatttttctgaaggtcacggaggattctgattcaggacctctgtttgcgggtggcgctcagcagaaaagagaaaacgtcaacccccgacacccctgcttgggtcccagagagaaggctggacagacaccccaggactccaatgtctgctccccaggggcgccggctgctcacccagagggccagcctcccccagagccagagtgcccaggcccgcagctcaacacggggacacagctggtcctccagcatgtgcaggcgctgctggtcaagagattccaacacaccatccgcagccacaaggacttcctggcgcagatcgtgctcccggctacctttgtgtttttggctctgatgctttctattgttatccctccttttggcgaataccccgctttgacccttcacccctggatatatgggcagcagtacaccttcttcagcatggatgaaccaggcagtgagcagttcacggtacttgcagacgtcctcctgaataagccaggctttggcaaccgctgcctgaaggaagggtggcttccggagtacccctgtggcaactcaacaccctggaagactccttctgtgtccccaaacatcacccagctgttccagaagcagaaatggacacaggtcaacccttcaccatcctgcaggtgcagcaccagggagaagctcaccatgctgccagagtgccccgagggtgccgggggcctcccgcccccccagagaacacagcgcagcacggaaattctacaagacctgacggacaggaacatctccgacttcttggtaaaaacgtatcctgctcttataagaagcagcttaaagagcaaattctgggtcaatgaacagaggtatggaggaatttccattggaggaaagctcccagtcgtccccatcacgggggaagcacttgttgggtttttaagcgaccttggccggatcatgaatgtgagcgggggccctatcactagagaggcctctaaagaaatacctgatttccttaaacatctagaaactgaagacaacattaaggtgtggtttaataacaaaggctggcatgccctggtcagctttctcaatgtggcccacaacgccatcttacgggccagcctgcctaaggacaggagccccgaggagtatggaatcaccgtcattagccaacccctgaacctgaccaaggagcagctctcagagattacagtgctgaccacttcagtggatgctgtggttgccatctgcgtgattttctccatgtccttcgtcccagccagctttgtcctttatttgatccaggagcgggtgaacaaatccaagcacctccagtttatcagtggagtgagccccaccacctactgggtgaccaacttcctctgggacatcatgaattattccgtgagtgctgggctggtggtgggcatcttcatcgggtttcagaagaaagcctacacttctccagaaaaccttcctgcccttgtggcactgctcctgctgtatggatgggcggtcattcccatgatgtacccagcatccttcctgtttgatgtccccagcacagcctatgtggctttatcttgtgctaatctgttcatcggcatcaacagcagtgctattaccttcatcttggaattatttgagaataaccggacgctgctcaggttcaacgccgtgctgaggaagctgctcattgtcttcccccacttctgcctgggccggggcctcattgaccttgcactgagccaggctgtgacagatgtctatgcccggtttggtgaggagcactctgcaaatccgttccactgggacctgattgggaagaacctgtttgccatggtggtggaaggggtggtgtacttcctcctgaccctgctggtccagcgccacttcttcctctcccaatggattgccgagcccactaaggagcccattgttgatgaagatgatgatgtggctgaagaaagacaaagaattattactggtggaaataaaactgacatcttaaggctacatgaactaaccaagatttatccaggcacctccagcccagcagtggacaggctgtgtgtcggagttcgccctggagagtgctttggcctcctgggagtgaatggtgccggcaaaacaaccacattcaagatgctcactggggacaccacagtgacctcaggggatgccaccgtagcaggcaagagtattttaaccaatatttctgaagtccatcaaaatatgggctactgtcctcagtttgatgcaattgatgagctgctcacaggacgagaacatctttacctttatgcccggcttcgaggtgtaccagcagaagaaatcgaaaaggttgcaaactggagtattaagagcctgggcctgactgtctacgccgactgcctggctggcacgtacagtgggggcaacaagcggaaactctccacagccatcgcactcattggctgcccaccgctggtgctgctggatgagcccaccacagggatggacccccaggcacgccgcatgctgtggaacgtcatcgtgagcatcatcagagaagggagggctgtggtcctcacatcccacagcatggaagaatgtgaggcactgtgtacccggctggccatcatggtaaagggcgcctttcgatgtatgggcaccattcagcatctcaagtccaaatttggagatggctatatcgtcacaatgaagatcaaatccccgaaggacgacctgcttcctgacctgaaccctgtggagcagttcttccaggggaacttcccaggcagtgtgcagagggagaggcactacaacatgctccagttccaggtctcctcctcctccctggcgaggatcttccagctcctcctctcccacaaggacagcctgctcatcgaggagtactcagtcacacagaccacactggaccaggtgtttgtaaattttgctaaacagcagactgaaagccatgacctccctctgcaccctcgagctgctggagccagtcgacaagcccaggacgactacaaagaccatgacggtgattataaagatcatgacatcgattacaaggatgacgatgacaagtaa

SEQ ID NO: 196 - protein, 735 aa, Adeno-associated virus [sequence omitted]

SEQ ID NO: 197 - DNA, 2208 bp, Adeno-associated virus
atggctgccgatggttatcttccagattggctcgaggacactctctctgaaggaataagacagtggtggaagctcaaacctggcccaccaccaccaaagcccgcagagcggcataaggacgacagcaggggtcttgtgcttcctgggtacaagtacctcggacccttcaacggactcgacaagggagagccggtcaacgaggcagacgccgcggccctcgagcacgacaaagcctacgaccggcagctcgacagcggagacaacccgtacctcaagtacaaccacgccgacgcggagtttcaggagcgccttaaagaagatacgtcttttgggggcaacctcggacgagcagtcttccaggcgaaaaagagggttcttgaacctctgggcctggttgaggaacctgttaagacggctccgggaaaaaagaggccggtagagcactctcctgtggagccagactcctcctcgggaaccggaaaggcgggccagcagcctgcaagaaaaagattgaattttggtcagactggagacgcagactcagtacctgacccccagcctctcggacagccaccagcagccccctctggtctgggaactaatacgatggctacaggcagtggcgcaccaatggcagacaataacgagggcgccgacggagtgggtaattcctcgggaaattggcattgcgattccacatggatgggcgacagagtcatcaccaccagcacccgaacctgggccctgcccacctacaacaaccacctctacaaacaaatttccagccaatcaggagcctcgaacgacaatcactactttggctacagcaccccttgggggtattttgacttcaacagattccactgccacttttcaccacgtgactggcaaagactcatcaacaacaactggggattccgacccaagagactcaacttcaagctctttaacattcaagtcaaagaggtcacgcagaatgacggtacgacgacgattgccaataaccttaccagcacggttcaggtgtttactgactcggagtaccagctcccgtacgtcctcggctcggcgcatcaaggatgcctcccgccgttcccagcagacgtcttcatggtgccacagtatggatacctcaccctgaacaacgggagtcaggcagtaggacgctcttcattttactgcctggagtactttccttctcagatgctgcgtaccggaaacaactttaccttcagctacacttttgaggacgttcctttccacagcagctacgctcacagccagagtctggaccgtctcatgaatcctctcatcgaccagtacctgtattacttgagcagaacaaacactccaagtggaaccaccacgcagtcaaggcttcagttttctcaggccggagcgagtgacattcgggaccagtctaggaactggcttcctggaccctgttaccgccagcagcgagtatcaaagacatctgcggataacaacaacagtgaatactcgtggactggagctaccaagtaccacctcaatggcagagactctctggtgaatccgggcccggccatggcaagccacaaggacgatgaagaaaagttttttcctcagagcggggttctcatctttgggaagcaaggctcagagaaaacaaatgtggacattgaaaaggtcatgattacagacgaagaggaaatcaggacaaccaatcccgtggctacggagcagtatggttctgtatctaccaacctccagagaggcaacagacaagcagctaccgcagatgtcaacacacaaggcgttcttccaggcatggtctggcaggacagagatgtgtaccttcaggggcccatctgggcaaagattccacacacggacggacattttcacccctctcccctcatgggtggattcggacttaaacaccctcctccacagattctcatcaagaacaccccggtacctgcgaatccttcgaccaccttcagtgcggcaaagtttgcttccttcatcacacagtactccacgggacaggtcagcgtggagatcgagtgggagctgcagaaggaaaacagcaaacgctggaatcccgaaattcagtacacttccaactacaacaagtctgttaatgtggactttactgtggacactaatggcgtgtattcagagcctcgccccattggcaccagatacctgactcgtaatctgtaa

SEQ ID NO: 198 - DNA, 2818 bp, Homo sapiens
gctccttcctgtactgcccagctccgcttgctccctgaccatccctgcagcagccctgatgtgtcattgtccccctcttaacctgcgctgcagtgctgcagggctgggctctggagctgggtctggtcatttctccttagatatgtagaggcccaggaaaggtttggagcctaagaagccctaggactccaggtctccagggcagccccagcctcttggaatgactttccctaataccacaggggtgttctaatcccaggcagacccaagctgcccctcaccaactcctacgtcctcaacttcctttcataacttctaggatggaaacacctaatcctccagcaatactgaggcttttctccttattctgttttcccttttgaagaagccaaggctcagagcagtcgagtcacctaatcatggtctcatgtcgcctgatcaaggtctcatgtcaccttatcaagatctcacccactcacctattcagttctcaccagttcagttcaggatggcttctaagctaccctgcacagctctgcccacaggacatttgtataagtgagggggtgcaggccttccagccccctccaactccaaaactcagcccccaagatcaagtggactctctgaacccaccctggccctacagttgtcagggtctggatgggaagatgtagagctctcggctttcactctggggacttacccagaacatattctcctcatgagctaaggaggctggctgccatcttcctacatccccccacggcctgggggcaaggacaccctggccccctggagtctggagaactctgaggacagaacttgctcttccacctgcttgggccttacccacaggagaagcactgcttctctacccatgccccatccaactcaggcaccccagggacttgcaacagtctgattttttctcacgtccttcttaaggctctgggctagccacacaaatcaaatcccagtgataggtccagacaatcctatcctgaaactacatcttagtaagactccagggaatcctttccccaaagacagtcttactcctgttctccccccaagcctttctgggccagaagctttgcctggactcaagcaatggcagacaagtgccctctgaggacacggaagtgcatgctcagaactgtgattctccaagtggaggcagaggagaaggcccaggcttcccagcagggctaaggatatgcaaggagtgcattcatccggaggtgttggcagcatcccagccccaccccattctcatcgtaaatcaggctcacttccattggctgcatacggtggagtgatgtgaccatatgtcacttgagcattacacaaatcctaatgagctaaaaatatgtttgttttagctaattgacctctttggccttcataaagcagttggtaaacatcctcagataatgatttccaaagagcagattgtgggtctcagctgtgcagagaaagcccacgtccctgagaccaccttctccagctgcctactgaggcacacaggggcgcctgcctgctgcccgctcagccaaggcggtgttgctggagccagcttgggacagctctcccaacgctctgccctggccttgcgaccactctctgggccgtagttgtctgtctgttaagtgaggaaagtgcccatctccagaggcattcagcggcaaagcagggcttccaggttccgaccccatagcaggacttcttggatttctacagccagtcagttgcaagcagcacccatattatttctataagaagtggcaggagctgggatctgaagagttcagcagtctacctttccctgtttcttgtgctttatgcagtcaggaggaatgatctggattccatgtgaagcctgggaccacggagacccaagacttcctgcttgattctccctgcgaactgcaggctgtgggctgagccttcaagaagcaggagtcccctctagccattaactctcagagctaacctcatttgaatgggaacactagtcctgtgatgtctggaaggtgggcgcctctacactccacaccctacatggtggtccagacacatcattcccagcattagaaagctgtagggggacccgttctgttccctggaggcattaaagggacatagaaataaatctcaagctctgaggctgatgccagcctcagactcagcctctgcactgtatgggccaattgtagccccaaggacttcttcttgctgcaccccctatctgtccacacctaaaacgatgggcttctatttagttacagaactctctggcctgttttgttttgctttgctttgttttgttttgtttttttgtttttttgttttttagctatgaaacagaggtaatatctaatacagataacttaccagtaatgagtgcttcctacttactgggtactgggaagaagtgctttacacatattttctcatttaatctacacaataagtaattaagacatttccctgaggccacgggagagacagtggcagaacagttctccaaggaggacttgcaagttaataactggactttgcaaggctctggtggaaactgtcagcttgtaaaggatggagcacagtgtctggcatgtagcaggaactaaaataatggcagtgattaatgttatgatatgcagacacaacacagcaagataagatgcaatgtaccttctgggtcaaaccaccctggccactcctccccgatacccagggttgatgtgcttgaattagacaggattaaaggcttactggagctggaagccttgccccaactcaggagtttagcccc

SEQ ID NO: 199 - DNA, 2100 bp, Homo sapiens
ccctgctaatttttgtattttttgtagagacagggtctcactatgttgcccaggctagtctcgaactcctgggctcaagtgatcctctcacctcggcctcccaaagaactgggattacaggcatgagctaccatgtccagcccaattgcccattgatgggcacgggttgcttccatgtttcagctgttgtgaatcacgctgctgtgaacatgcgtgtgcaaacagcccttccagaccctgccttccattcctctgggcctatacccagcagtgcggttgctgggtcctatgggaattctacgtttaacttttggaggagctgccaaactgttttccacagtggctgcgccatcacaatccaattttaggacatttttatcacccataaagcactccctgtacccattaagaagtcatcctccatttccctccctcccctgtcctggcacccattcctctgctttgtgtgtctctggattgccctatctaagcatttcacagagatggagccatgcgctccgtggtcttttgtgtctggcttcgctcactgagcatgctgttctccaggtccatccacgttgtagcgtaggtcagcccttcattccctgttatggccaaatgatactccattgtacagacaggccactttttacccactcatctgcttctggacttttgggttgcttctaccatgtggcctgttgggaacagtgctctgtttgtattcatgtacgggtttttgtgtggacacacattttcaagtctcttgggtacacaggtgtagaagtgccagagttggggaaaaagctcacctttctaggctgtgaatgggccctggcaagtctgtggccaggactcgtcttctcttccacatggggcccctagcttggcacctagcacgtggcaggcagcgacagatgttaaaagccattcttgctatgggtagccaggctggggctccatgcagccctggccttcagcttggcagccagggcccccttgtgcctgcagcagaagccatgctgccaggagtgtaagtgtgagccaggaatgctggagaatcgtggctctgagaacagggacaagaggccacaagctcacgccttggctttcctaagcttaaggaataaacccaaaaggaggtacctggaaggagctggatttggggactgaggagctgggagctgatggaagccgtgaaaggggatgtgctcctggggaggcgctggggcgggtgggccgtggaggggacagggcccgttggttggaaactgaggcgaggctacggagttgggcactaacaggtcatccgtgcccctgcgaagcgtggggacacagggacagcagagatggcctgtctggacactctgtcgacggggggcctgtggttggtgaagcccaaggcaaggctgtgaactcagggcaagggagacgtgagcaggcgctgccgtgggctgatgtgggcactgcatgtgcaccctggcggccaaaggacctacagctcatggggggcaagggggaggagggaagccaacagcaggatgtgcgcagtcagtctgccccccctacactggaggaggagccccccggcacaaatctcgcccgtttgggcccacggacatggctggcctcgcaaggaggatccggttccaggcctcggccctaaatagtctccctgggctttcaagagaaccacatgagaaaggaggattcgggctctgagcagtttcaccacccaccccccagtctgcaaatcctgacccgtgggtccacctgccccaaaggcggacgcaggacagtagaagggaacagagaacacataaacacagagagggccacagcggctcccacagtcaccgccaccttcctggcggggatgggtggggcgtctgagtttggttcccagcaaatccctctgagccgcccttgcgggctcgcctcaggagcaggggagcaagaggtgggaggaggaggtctaagtcccaggcccaattaagagatcaggtagtgtagggtttgggagcttttaaggtgaagaggcccgggctgatcccacaggccagtataaagcgccgtgaccctcaggtgatgcgccagggc

SEQ ID NO: 200 - DNA, 136 bp, Homo sapiens; identical to SEQ ID NO: 160

SEQ ID NO: 201 - protein, 2215 aa, Homo sapiens
MVILQQGDHVWMDLRLGQEFDVPIGAVVKLCDSGQVQVVDDEDNEHWISPQNATHIKPMHPTSVHGVEDMIRLGDLNEAGILRNLLIRYRDHLIYTYTGSILVAVNPYQLLSIYSPEHIRQYTNKKIGEMPPHIFAIADNCYFNMKRNSRDQCCIISGESGAGKTESTKLILQFLAAISGQHSWIEQQVLEATPILEAFGNAKTIRNDNSSRFGKYIDIHFNKRGAIEGAKIEQYLLEKSRVCRQALDERNYHVFYCMLEGMSEDQKKKLGLGQASDYNYLAMGNCITCEGRVDSQEYANIRSAMKVLMFTDTENWEISKLLAAILHLGNLQYEARTFENLDACEVLFSPSLATAASLLEVNPPDLMSCLTSRTLITRGETVSTPLSREQALDVRDAFVKGIYGRLFVWIVDKINAAIYKPPSQDVKNSRRSIGLLDIFGFENFAVNSFEQLCINFANEHLQQFFVRHVFKLEQEEYDLESIDWLHIEFTDNQDALDMIANKPMNIISLIDEESKFPKGTDTTMLHKLNSQHKLNANYIPPKNNHETQFGINHFAGIVYYETQGFLEKNRDTLHGDIIQLVHSSRNKFIKQIFQADVAMGAETRKRSPTLSSQFKRSLELLMRTLGACQPFFVRCIKPNEFKKPMLFDRHLCVRQLRYSGMMETIRIRRAGYPIRYSFVEFVERYRVLLPGVKPAYKQGDLRGTCQRMAEAVLGTHDDWQIGKTKIFLKDHHDMLLEVERDKAITDRVILLQKVIRGFKDRSNFLKLKNAATLIQRHWRGHNCRKNYGLMRLGFLRLQALHRSRKLHQQYRLARQRIIQFQARCRAYLVRKAFRHRLWAVLTVQAYARGMIARRLHQRLRAEYLWRLEAEKMRLAEEEKLRKEMSAKKAKEEAERKHQERLAQLAREDAERELKEKEAARRKKELLEQMERARHEPVNHSDMVDKMFGFLGTSGGLPGQEGQAPSGFEDLERGRREMVEEDLDAALPLPDEDEEDLSEYKFAKFAATYFQGTTTHSYTRRPLKQPLLYHDDEGDQLAALAVWITILRFMGDLPEPKYHTAMSDGSEKIPVMTKIYETLGKKTYKRELQALQGEGEAQLPEGQKKSSVRHKLVHLTLKKKSKLTEEVTKRLHDGESTVQGNSMLEDRPTSNLEKLHFIIGNGILRPALRDEIYCQISKQLTHNPSKSSYARGWILVSLCVGCFAPSEKFVKYLRNFIHGGPPGYAPYCEERLRRTFVNGTRTQPPSWLELQATKSKKPIMLPVTFMDGTTKTLLTDSATTAKELCNALADKISLKDRFGFSLYIALFDKVSSLGSGSDHVMDAISQCEQYAKEQGAQERNAPWRLFFRKEVFTPWHSPSEDNVATNLIYQQVVRGVKFGEYRCEKEDDLAELASQQYFVDYGSEMILERLLNLVPTYIPDREITPLKTLEKWAQLAIAAHKKGIYAQRRTDAQKVKEDVVSYARFKWPLLFSRFYEAYKFSGPSLPKNDVIVAVNWTGVYFVDEQEQVLLELSFPEIMAVSSSRECRVWLSLGCSDLGCAAPHSGWAGLTPAGPCSPCWSCRGAKTTAPSFTLATIKGDEYTFTSSNAEDIRDLVVTFLEGLRKRSKYVVALQDNPNPAGEESGFLSFAKGDLIILDHDTGEQVMNSGWANGINERTKQRGDFPTDSVYVMPTVTMPPREIVALVTMTPDQRQDVVRLLQLRTAEPEVRAKPYTLEEFSYDYFRPPPKHTLSRVMVSKARGKDRLWSHTREPLKQALLKKLLGSEELSQEACLAFIAVLKYMGDYPSKRTRSVNELTDQIFEGPLKAEPLKDEAYVQILKQLTDNHIRYSEERGWELLWLCTGLFPPSNILLPHVQRFLQSRKHCPLAIDCLQRLQKALRNGSRKYPPHLVEVEAIQHKTTQIFHKVYFPDDTDEAFEVESSTKAKDFCQNIATRLLLKSSEGFSLFVKIADKVLSVPENDFFFDFVRHLTDWIKKARPIKDGIVPSLTYQVFFMKKLWTTTVPGKDPMADSIFHYYQELPKYLRGYHKCTREEVLQLGALIYRVKFEEDKSYFPSIPKLLRELVPQDLIRQVSPDDWKRSIVAYFNKHAGKSKEEAKLAFLKLIFKWPTFGSAFFEVKQTTEPNFPEILLIAINKYGVSLIDPKTKDILTTHPFTKISNWSSGNTYFHITIGNLVRGSKLLCETSLGYKMDDLLTSYISQMLTAMSKQRGSRSGK

SEQ ID NO: 202 - DNA, 6648 bp, Homo sapiens
atggtgattcttcagcagggggaccatgtgtggatggacctgagattggggcaggagttcgacgtgcccatcggggcggtggtgaagctctgcgactctgggcaggtccaggtggtggatgatgaagacaatgaacactggatctctccgcagaacgcaacgcacatcaagcctatgcaccccacgtcggtccacggcgtggaggacatgatccgcctgggggacctcaacgaggcgggcatcttgcgcaacctgcttatccgctaccgggaccacctcatctacacgtatacgggctccatcctggtggctgtgaacccctaccagctgctctccatctactcgccagagcacatccgccagtataccaacaagaagattggggagatgcccccccacatctttgccattgctgacaactgctacttcaacatgaaacgcaacagccgagaccagtgctgcatcatcagtggggaatctggggccgggaagacggagagcacaaagctgatcctgcagttcctggcagccatcagtgggcagcactcgtggattgagcagcaggtcttggaggccacccccattctggaagcatttgggaatgccaagaccatccgcaatgacaactcaagccgtttcggaaagtacatcgacatccacttcaacaagcggggcgccatcgagggcgcgaagattgagcagtacctgctggaaaagtcacgtgtctgtcgccaggccctggatgaaaggaactaccacgtgttctactgcatgctggagggtatgagtgaggatcagaagaagaagctgggcttgggccaggcctctgactacaactacttggccatgggtaactgcataacctgtgagggccgggtggacagccaggagtacgccaacatccgctccgccatgaaggtgctcatgttcactgacaccgagaactgggagatctcgaagctcctggctgccatcctgcacctgggcaacctgcagtatgaggcacgcacatttgaaaacctggatgcctgtgaggttctcttctccccatcgctggccacagctgcatccctgcttgaggtgaaccccccagacctgatgagctgcctgactagccgcaccctcatcacccgcggggagacggtgtccaccccactgagcagggaacaggcactggacgtgcgcgacgccttcgtaaaggggatctacgggcggctgttcgtgtggattgtggacaagatcaacgcagcaatttacaagcctccctcccaggatgtgaagaactctcgcaggtccatcggcctcctggacatctttgggtttgagaactttgctgtgaacagctttgagcagctctgcatcaacttcgccaatgagcacctgcagcagttctttgtgcggcacgtgttcaagctggagcaggaggaatatgacctggagagcattgactggctgcacatcgagttcactgacaaccaggatgccctggacatgattgccaacaagcccatgaacatcatctccctcatcgatgaggagagcaagttccccaagggcacagacaccaccatgttacacaagctgaactcccagcacaagctcaacgccaactacatcccccccaagaacaaccatgagacccagtttggcatcaaccattttgcaggcatcgtctactatgagacccaaggcttcctggagaagaaccgagacaccctgcatggggacattatccagctggtccactcctccaggaacaagttcatcaagcagatcttccaggccgatgtcgccatgggcgccgagaccaggaagcgctcgcccacacttagcagccagttcaagcggtcactggagctgctgatgcgcacgctgggtgcctgccagcccttctttgtgcgatgcatcaagcccaatgagttcaagaagcccatgctgttcgaccggcacctgtgcgtgcgccagctgcggtactcaggaatgatggagaccatccgaatccgccgagctggctaccccatccgctacagcttcgtagagtttgtggagcggtaccgtgtgctgctgccaggtgtgaagccggcctacaagcagggcgacctccgcgggacttgccagcgcatggctgaggctgtgctgggcacccacgatgactggcagataggcaaaaccaagatctttctgaaggaccaccatgacatgctgctggaagtggagcgggacaaagccatcaccgacagagtcatcctccttcagaaagtcatccggggattcaaagacaggtctaactttctgaagctgaagaacgctgccacactgatccagaggcactggcggggtcacaactgtaggaagaactacgggctgatgcgtctgggcttcctgcggctgcaggccctgcaccgctcccggaagctgcaccagcagtaccgcctggcccgccagcgcatcatccagttccaggcccgctgccgcgcctatctggtgcgcaaggccttccgccaccgcctctgggctgtgctcaccgtgcaggcctatgcccggggcatgatcgcccgcaggctgcaccaacgcctcagggctgagtatctgtggcgcctcgaggctgagaaaatgcggctggcggaggaagagaagcttcggaaggagatgagcgccaagaaggccaaggaggaggccgagcgcaagcatcaggagcgcctggcccagctggctcgtgaggacgctgagcgggagctgaaggagaaggaggccgctcggcggaagaaggagctcctggagcagatggaaagggcccgccatgagcctgtcaatcactcagacatggtggacaagatgtttggcttcctggggacttcaggtggcctgccaggccaggagggccaggcacctagtggctttgaggacctggagcgagggcggagggagatggtggaggaggacctggatgcagccctgcccctgcctgacgaggatgaggaggacctctctgagtataaatttgccaagttcgcggccacctacttccaggggacaaccacgcactcctacacccggcggccactcaaacagccactgctctaccatgacgacgagggtgaccagctggcagccctggcggtctggatcaccatcctccgcttcatgggggacctccctgagcccaagtaccacacagccatgagtgatggcagtgagaagatccctgtgatgaccaagatttatgagaccctgggcaagaagacgtacaagagggagctgcaggccctgcagggcgagggcgaggcccagctccccgagggccagaagaagagcagtgtgaggcacaagctggtgcatttgactctgaaaaagaagtccaagctcacagaggaggtgaccaagaggctgcatgacggggagtccacagtgcagggcaacagcatgctggaggaccggcccacctccaacctggagaagctgcacttcatcatcggcaatggcatcctgcggccagcactccgggacgagatctactgccagatcagcaagcagctgacccacaacccctccaagagcagctatgcccggggctggattctcgtgtctctctgcgtgggctgtttcgccccctccgagaagtttgtcaagtacctgcggaacttcatccacgggggcccgcccggctacgccccgtactgtgaggagcgcctgagaaggacctttgtcaatgggacacggacacagccgcccagctggctggagctgcaggccaccaagtccaagaagccaatcatgttgcccgtgacattcatggatgggaccaccaagaccctgctgacggactcggcaaccacggccaaggagctctgcaacgcgctggccgacaagatctctctcaaggaccggttcgggttctccctctacattgccctgtttgacaaggtgtcctccctgggcagcggcagtgaccacgtcatggacgccatctcccagtgcgagcagtacgccaaggagcagggcgcccaggagcgcaacgccccctggaggctcttcttccgcaaagaggtcttcacgccctggcacagcccctccgaggacaacgtggccaccaacctcatctaccagcaggtggtgcgaggagtcaagtttggggagtacaggtgtgagaaggaggacgacctggctgagctggcctcccagcagtactttgtagactatggctctgagatgatcctggagcgcctcctgaacctcgtgcccacctacatccccgaccgcgagatcacgcccctgaagacgctggagaagtgggcccagctggccatcgccgcccacaagaaggggatttatgcccagaggagaactgatgcccagaaggtcaaagaggatgtggtcagttatgcccgcttcaagtggcccttgctcttctccaggttttatgaagcctacaaattctcaggccccagtctccccaagaacgacgtcatcgtggccgtcaactggacgggtgtgtactttgtggatgagcaggagcaggtacttctggagctgtccttcccagagatcatggccgtgtccagcagcagggagtgccgtgtctggctctcactgggctgctctgatcttggctgtgctgcgcctcactcaggctgggcaggactgaccccggcggggccctgttctccgtgttggtcctgcaggggagcgaaaacgacggcccccagcttcacgctggccaccatcaagggggacgaatacaccttcacctccagcaatgctgaggacattcgtgacctggtggtcaccttcctagaggggctccggaagagatctaagtatgttgtggccctgcaggataaccccaaccccgcaggcgaggagtcaggcttcctcagctttgccaagggagacctcatcatcctggaccatgacacgggcgagcaggtcatgaactcgggctgggccaacggcatcaatgagaggaccaagcagcgtggggacttccccaccgacagtgtgtacgtcatgcccactgtcaccatgccaccgcgggagattgtggccctggtcaccatgactcccgatcagaggcaggacgttgtccggctcttgcagctgcgaacggcggagcccgaggtgcgtgccaagccctacacgctggaggagttttcctatgactacttcaggcccccacccaagcacacgctgagccgtgtcatggtgtccaaggcccgaggcaaggaccggctgtggagccacacgcgggaaccgctcaagcaggcgctgctcaagaagctcctgggcagtgaggagctctcgcaggaggcctgcctggccttcattgctgtgctcaagtacatgggcgactacccgtccaagaggacacgctccgtcaacgagctcaccgaccagatctttgagggtcccctgaaagccgagcccctgaaggacgaggcatatgtgcagatcctgaagcagctgaccgacaaccacatcaggtacagcgaggagcggggttgggagctgctctggctgtgcacgggccttttcccacccagcaacatcctcctgccccacgtgcagcgcttcctgcagtcccgaaagcactgcccactcgccatcgactgcctgcaacggctccagaaagccctgagaaacgggtcccggaagtaccctccgcacctggtggaggtggaggccatccagcacaagaccacccagattttccacaaagtctacttccctgatgacactgacgaggccttcgaagtggagtccagcaccaaggccaaggacttctgccagaacatcgccaccaggctgctcctcaagtcctcagagggattcagcctctttgtcaaaattgcagacaaggtcctcagcgttcctgagaatgacttcttctttgactttgttcgacacttgacagactggataaagaaagctcggcccatcaaggacggaattgtgccctcactcacctaccaggtgttcttcatgaagaagctgtggaccaccacggtgccagggaaggatcccatggccgattccatcttccactattaccaggagttgcccaagtatctccgaggctaccacaagtgcacgcgggaggaggtgctgcagctgggggcgctgatctacagggtcaagttcgaggaggacaagtcctacttccccagcatccccaagctgctgcgggagctggtgccccaggaccttatccggcaggtctcacctgatgactggaagcggtccatcgtcgcctacttcaacaagcacgcagggaagtccaaggaggaggccaagctggccttcctgaagctcatcttcaagtggcccacctttggctcagccttcttcgaggtgaagcaaactacggagccaaacttccctgagatcctcctaattgccatcaacaagtatggggtcagcctcatcgatcccaaaacgaaggatatcctcaccactcatcccttcaccaagatctccaactggagcagcggcaacacctacttccacatcaccattgggaacttggtgcgcgggagcaaactgctctgcgagacgtcactgggctacaagatggatgacctcctgacttcctacattagccagatgctcacagccatgagcaaacagcggggctccaggagcggcaagtga

SEQ ID NO: 203 - protein, 2479 aa, Homo sapiens
MPPNINWKEIMKVDPDDLPRQEELADNLLISLSKVEVNELKSEKQENVIHLFRITQSLMKMKAQEVELALEEVEKAGEEQAKFENQLKTKVMKLENELEMAQQSAGGRDTRFLRNEICQLEKQLEQKDRELEDMEKELEKEKKVNEQLALRNEEAENENSKLRRENKRLKKKNEQLCQDIIDYQKQIDSQKETLLSRRGEDSDYRSQLSKKNYELIQYLDEIQTLTEANEKIEVQNQEMRKNLEESVQEMEKMTDEYNRMKAIVHQTDNVIDQLKKENDHYQLQVQELTDLLKSKNEEDDPIMVAVNAKVEEWKLILSSKDDEIIEYQQMLHNLREKLKNAQLDADKSNVMALQQGIQERDSQIKMLTEQVEQYTKEMEKNTCIIEDLKNELQRNKGASTLSQQTHMKIQSTLDILKEKTKEAERTAELAEADAREKDKELVEALKRLKDYESGVYGLEDAVVEIKNCKNQIKIRDREIEILTKEINKLELKISDFLDENEALRERVGLEPKTMIDLTEFRNSKHLKQQQYRAENQILLKEIESLEEERLDLKKKIRQMAQERGKRSATSGLTTEDLNLTENISQGDRISERKLDLLSLKNMSEAQSKNEFLSRELIEKERDLERSRTVIAKFQNKLKELVEENKQLEEGMKEILQAIKEMQKDPDVKGGETSLIIPSLERLVNAIESKNAEGIFDASLHLKAQVDQLTGRNEELRQELRESRKEAINYSQQLAKANLKIDHLEKETSLLRQSEGSNVVFKGIDLPDGIAPSSASIINSQNEYLIHLLQELENKEKKLKNLEDSLEDYNRKFAVIRHQQSLLYKEYLSEKETWKTESKTIKEEKRKLEDQVQQDAIKVKEYNNLLNALQMDSDEMKKILAENSRKITVLQVNEKSLIRQYTTLVELERQLRKENEKQKNELLSMEAEVCEKIGCLQRFKEMAIFKIAALQKVVDNSVSLSELELANKQYNELTAKYRDILQKDNMLVQRTSNLEHLECENISLKEQVESINKELEITKEKLHTIEQAWEQETKLGNESSMDKAKKSITNSDIVSISKKITMLEMKELNERQRAEHCQKMYEHLRTSLKQMEERNFELETKFAELTKINLDAQKVEQMLRDELADSVSKAVSDADRQRILELEKNEMELKVEVSKLREISDIARRQVEILNAQQQSRDKEVESLRMQLLDYQAQSDEKSLIAKLHQHNVSLQLSEATALGKLESITSKLQKMEAYNLRLEQKLDEKEQALYYARLEGRNRAKHLRQTIQSLRRQFSGALPLAQQEKFSKTMIQLQNDKLKIMQEMKNSQQEHRNMENKTLEMELKLKGLEELISTLKDTKGAQKVINWHMKIEELRLQELKLNRELVKDKEEIKYLNNIISEYERTISSLEEEIVQQNKFHEERQMAWDQREVDLERQLDIFDRQQNEILNAAQKFEEATGSIPDPSLPLPNQLEIALRKIKENIRIILETRATCKSLEEKLKEKESALRLAEQNILSRDKVINELRLRLPATAEREKLIAELGRKEMEPKSHHTLKIAHQTIANMQARLNQKEEVLKKYQRLLEKAREEQREIVKKHEEDLHILHHRLELQADSSLNKFKQTAWDLMKQSPTPVPTNKHFIRLAEMEQTVAEQDDSLSSLLVKLKKVSQDLERQREITELKVKEFENIKLQLQENHEDEVKKVKAEVEDLKYLLDQSQKESQCLKSELQAQKEANSRAPTTTMRNLVERLKSQLALKEKQQKALSRALLELRAEMTAAAEERIISATSQKEAHLNVQQIVDRHTRELKTQVEDLNENLLKLKEALKTSKNRENSLTDNLNDLNNELQKKQKAYNKILREKEEIDQENDELKRQIKRLTSGLQGKPLTDNKQSLIEELQRKVKKLENQLEGKVEEVDLKPMKEKNAKEELIRWEEGKKWQAKIEGIRNKLKEKEGEVFTLTKQLNTLKDLFAKADKEKLTLQRKLKTTGMTVDQVLGIRALESEKELEELKKRNLDLENDILYMRAHQALPRDSVVEDLHLQNRYLQEKLHALEKQFSKDTYSKPSISGIESDDHCQREQELQKENLKLSSENIELKFQLEQANKDLPRLKNQVRDLKEMCEFLKKEKAEVQRKLGHVRGSGRSGKTIPELEKTIGLMKKVVEKVQRENEQLKKASGILTSEKMANIEQENEKLKAELEKLKAHLGHQLSMHYESKTKGTEKIIAENERLRKELKKETDAAEKLRIAKNNLEILNEKMTVQLEETGKRLQFAESRGPQLEGADSKSWKSIVVTRMYETKLKELETDIAKKNQSITDLKQLVKEATEREQKVNKYNEDLEQQIKILKHVPEGAETEQGLKRELQVLRLANHQLDKEKAELIHQIEANKDQSGAESTIPDADQLKEKIKDLETQLKMSDLEKQHLKEEIKKLKKELENFDPSFFEEIEDLKYNYKEEVKKNILLEEKVKKLSEQLGVELTSPVAASEEFEDEEESPVNFPIY

SEQ ID NO: 204 - DNA, 7440 bp, Homo sapiens
atgccacctaatataaactggaaagaaataatgaaagttgacccagatgacctgccccgtcaagaagaactggcagataatttattgatttccttatccaaggtggaagtaaatgagctaaaaagtgaaaagcaagaaaatgtgatacaccttttcagaattactcagtcactaatgaagatgaaagctcaagaagtggagctggctttggaagaagtagaaaaagctggagaagaacaagcaaaatttgaaaatcaattaaaaactaaagtaatgaaactggaaaatgaactggagatggctcagcagtctgcaggtggacgagatactcggtttttacgtaatgaaatttgccaacttgaaaaacaattagaacaaaaagatagagaattggaggacatggaaaaggagttggagaaagagaagaaagttaatgagcaattggctcttcgaaatgaggaggcagaaaatgaaaacagcaaattaagaagagagaacaaacgtctaaagaaaaagaatgaacaactttgtcaggatattattgactaccagaaacaaatagattcacagaaagaaacacttttatcaagaagaggggaagacagtgactaccgatcacagttgtctaaaaaaaactatgagcttatccaatatcttgatgaaattcagactttaacagaagctaatgagaaaattgaagttcagaatcaagaaatgagaaaaaatttagaagagtctgtacaggaaatggagaagatgactgatgaatataatagaatgaaagctattgtgcatcagacagataatgtaatagatcagttaaaaaaagaaaacgatcattatcaacttcaagtgcaggagcttacagatcttctgaaatcaaaaaatgaagaagatgatccaattatggtagctgtcaatgcaaaagtagaagaatggaagctaattttgtcttctaaagatgatgaaattattgagtatcagcaaatgttacataacctaagggagaaacttaagaatgctcagcttgatgctgataaaagtaatgttatggctctacagcagggtatacaggaacgagacagtcaaattaagatgctcaccgaacaagtagaacaatatacaaaagaaatggaaaagaatacttgtattattgaagatttgaaaaatgagctccaaagaaacaaaggtgcttcaaccctttctcaacagactcatatgaaaattcagtcaacgttagacattttaaaagagaaaactaaagaggctgagagaacagctgaactggctgaggctgatgctagggaaaaggataaagaattagttgaggctctgaagaggttaaaagattatgaatcgggagtatatggtttagaagatgctgtcgttgaaataaagaattgtaaaaaccaaattaaaataagagatcgagagattgaaatattaacaaaggaaatcaataaacttgaattgaagatcagtgatttccttgatgaaaatgaggcacttagagagcgtgtgggccttgaaccaaagacaatgattgatttaactgaatttagaaatagcaaacacttaaaacagcagcagtacagagctgaaaaccagattcttttgaaagagattgaaagtctagaggaagaacgacttgatctgaaaaaaaaaattcgtcaaatggctcaagaaagaggaaaaagaagtgcaacttcaggattaaccactgaggacctgaacctaactgaaaacatttctcaaggagatagaataagtgaaagaaaattggatttattgagcctcaaaaatatgagtgaagcacaatcaaagaatgaatttctttcaagagaactaattgaaaaagaaagagatttagaaaggagtaggacagtgatagccaaatttcagaataaattaaaagaattagttgaagaaaataagcaacttgaagaaggtatgaaagaaatattgcaagcaattaaggaaatgcagaaagatcctgatgttaaaggaggagaaacatctctaattatccctagccttgaaagactagttaatgctatagaatcaaagaatgcagaaggaatctttgatgcgagtctgcatttgaaagcccaagttgatcagcttaccggaagaaatgaagaattaagacaggagctcagggaatctcggaaagaggctataaattattcacagcagttggcaaaagctaatttaaagatagaccatcttgaaaaagaaactagtcttttacgacaatcagaaggatcaaatgttgtttttaaaggaattgacttacctgatgggatagcaccatctagtgccagtatcattaattctcagaatgaatatttaatacatttgttacaggaactagaaaataaagaaaaaaagttaaagaatttagaagattctcttgaagattacaacagaaaatttgctgtaattcgtcatcaacaaagtttgttgtataaagaatacctaagtgaaaaggagacctggaaaacagaatctaaaacaataaaagaggaaaagagaaaacttgaggatcaagtccaacaagatgctataaaagtaaaagaatataataatttgctcaatgctcttcagatggattcggatgaaatgaaaaaaatacttgcagaaaatagtaggaaaattactgttttgcaagtgaatgaaaaatcacttataaggcaatatacaaccttagtagaattggagcgacaacttagaaaagaaaatgagaagcaaaagaatgaattgttgtcaatggaggctgaagtttgtgaaaaaattgggtgtttgcaaagatttaaggaaatggccattttcaagattgcagctctccaaaaagttgtagataatagtgtttctttgtctgaactagaactggctaataaacagtacaatgaactgactgctaagtacagggacatcttgcaaaaagataatatgcttgttcaaagaacaagtaacttggaacacctggagtgtgaaaacatctccttaaaagaacaagtggagtctataaataaagaactggagattaccaaggaaaaacttcacactattgaacaagcctgggaacaggaaactaaattaggtaatgaatctagcatggataaggcaaagaaatcaataaccaacagtgacattgtttccatttcaaaaaaaataactatgctggaaatgaaggaattaaatgaaaggcagcgggctgaacattgtcaaaaaatgtatgaacacttacggacttcgttaaagcaaatggaggaacgtaattttgaattggaaaccaaatttgctgagcttaccaaaatcaatttggatgcacagaaggtggaacagatgttaagagatgaattagctgatagtgtgagcaaggcagtaagtgatgctgataggcaacggattctagaattagagaagaatgaaatggaactaaaagttgaagtgtcaaaactgagagagatttctgatattgccagaagacaagttgaaattttgaatgcacaacaacaatctagggacaaggaagtagagtccctcagaatgcaactgctagactatcaggcacagtctgatgaaaagtcgctcattgccaagttgcaccaacataatgtctctcttcaactgagtgaggctactgctcttggtaagttggagtcaattacatctaaactgcagaagatggaggcctacaacttgcgcttagagcagaaacttgatgaaaaagaacaggctctctattatgctcgtttggagggaagaaacagagcaaaacatctgcgccaaacaattcagtctctacgacgacagtttagtggagctttacccttggcacaacaggaaaagttctccaaaacaatgattcaactacaaaatgacaaacttaagataatgcaagaaatgaaaaattctcaacaagaacatagaaatatggagaacaaaacattggagatggaattaaaattaaagggcctggaagagttaataagcactttaaaggataccaaaggagcccaaaaggtaatcaactggcatatgaaaatagaagaacttcgtcttcaagaacttaaactaaatcgggaattagtcaaggataaagaagaaataaaatatttgaataacataatttctgaatatgaacgtacaatcagcagtcttgaagaagaaattgtgcaacagaacaagtttcatgaagaaagacaaatggcctgggatcaaagagaagttgacctggaacgccaactagacatttttgaccgtcagcaaaatgaaatactaaatgcggcacaaaagtttgaagaagctacaggatcaatccctgaccctagtttgccccttccaaatcaacttgagatcgctctaaggaaaattaaggagaacattcgaataattctagaaacacgggcaacttgcaaatcactagaagagaaactaaaagagaaagaatctgctttaaggttagcagaacaaaatatactgtcaagagacaaagtaatcaatgaactgaggcttcgattgcctgccactgcagaaagagaaaagctcatagctgagctaggcagaaaagagatggaaccaaaatctcaccacacattgaaaattgctcatcaaaccattgcaaacatgcaagcaaggttaaatcaaaaagaagaagtattaaagaagtatcaacgtcttctagaaaaagccagagaggagcaaagagaaattgtgaagaaacatgaggaagaccttcatattcttcatcacagattagaactacaggctgatagttcactaaataaattcaaacaaacggcttgggatttaatgaaacagtctcccactccagttcctaccaacaagcattttattcgtctggctgagatggaacagacagtagcagaacaagatgactctctttcctcactcttggtcaaactaaagaaagtatcacaagatttggagagacaaagagaaatcactgaattaaaagtaaaagaatttgaaaatatcaaattacagcttcaagaaaaccatgaagatgaagtgaaaaaagtaaaagcggaagtagaggatttaaagtatcttctggaccagtcacaaaaggagtcacagtgtttaaaatctgaacttcaggctcaaaaagaagcaaattcaagagctccaacaactacaatgagaaatctagtagaacggctaaagagccaattagccttgaaggagaaacaacagaaagcacttagtcgggcacttttagaactccgggcagaaatgacagcagctgctgaagaacgtattatttctgcaacttctcaaaaagaggcccatctcaatgttcaacaaatcgttgatcgacatactagagagctaaagacacaagttgaagatttaaatgaaaatcttttaaaattgaaagaagcacttaaaacaagtaaaaacagagaaaactcactaactgataatttgaatgacttaaataatgaactgcaaaagaaacaaaaagcctataataaaatacttagagagaaagaggaaattgatcaagagaatgatgaactgaaaaggcaaattaaaagactaaccagtggattacagggcaaacccctgacagataataaacaaagtctaattgaagaactccaaaggaaagttaaaaaactagagaaccaattagagggaaaggtggaggaagtagacctaaaacctatgaaagaaaagaatgctaaagaagaattaattaggtgggaagaaggtaaaaagtggcaagccaaaatagaaggaattcgaaacaagttaaaagagaaagagggggaagtctttactttaacaaagcagttgaatactttgaaggatctttttgccaaagccgataaagagaaacttactttgcagaggaaactaaaaacaactggcatgactgttgatcaggttttgggaatacgagctttggagtcagaaaaagaattggaagaattaaaaaagagaaatcttgacttagaaaatgatatattgtatatgagggcccaccaagctcttcctcgagattctgttgtagaagatttacatttacaaaatagatacctccaagaaaaacttcatgctttagaaaaacagttttcaaaggatacatattctaagccttcaatttcaggaatagagtcagatgatcattgtcagagagaacaggagcttcagaaggaaaacttgaagttgtcatctgaaaatattgaactgaaatttcagcttgaacaagcaaataaagatttgccaagattaaagaatcaagtcagagatttgaaggaaatgtgtgaatttcttaagaaagaaaaagcagaagttcagcggaaacttggccatgttagagggtctggtagaagtggaaagacaatcccagaactggaaaaaaccattggtttaatgaaaaaagtagttgaaaaagtccagagagaaaatgaacagttgaaaaaagcatcaggaatattgactagtgaaaaaatggctaatattgagcaggaaaatgaaaaattgaaggctgaattagaaaaacttaaagctcatcttgggcatcagttgagcatgcactatgaatccaagaccaaaggcacagaaaaaattattgctgaaaatgaaaggcttcgtaaagaacttaaaaaagaaactgatgctgcagagaaattacggatagcaaagaataatttagagatattaaatgagaagatgacagttcaactagaagagactggtaagagattgcagtttgcagaaagcagaggtccacagcttgaaggtgctgacagtaagagctggaaatccattgtggttacaagaatgtatgaaaccaagttaaaagaattggaaactgatattgccaaaaaaaatcaaagcattactgaccttaaacagcttgtaaaagaagcaacagagagagaacaaaaagttaacaaatacaatgaagaccttgaacaacagattaagattcttaaacatgttcctgaaggtgctgagacagagcaaggccttaaacgggagcttcaagttcttagattagctaatcatcagctggataaagagaaagcagaattaatccatcagatagaagctaacaaggaccaaagtggagctgaaagcaccatacctgatgctgatcaactaaaggaaaaaataaaagatctagagacacagctcaaaatgtcagatctagaaaagcagcatttgaaggaggaaataaagaagctgaaaaaagaactggaaaattttgatccttcattttttgaagaaattgaagatcttaagtataattacaaggaagaagtgaagaagaatattctcttagaagagaaggtaaaaaaactttcagaacaattgggagttgaattaactagccctgttgctgcttctgaagagtttgaagatgaagaagaaagtcctgttaatttccccatttactaa

SEQ ID NO: 205 - protein, 724 aa, Adeno-associated virus
MSFVDHPPDWLEEVGEGLREFLGLEAGPPKPKPNQQHQDQARGLVLPGYNYLGPGNGLDRGEPVNRADEVAREHDISYNEQLEAGDNPYLKYNHADAEFQEKLADDTSFGGNLGKAVFQAKKRVLEPFGLVEEGAKTAPTGKRIDDHFPKRKKARTEEDSKPSTSSDAEAGPSGSQQLQIPAQPASSLGADTMSAGGGGPLGDNNQGADGVGNASGDWHCDSTWMGDRVVTKSTRTWVLPSYNNHQYREIKSGSVDGSNANAYFGYSTPWGYFDFNRFHSHWSPRDWQRLINNYWGFRPRSLRVKIFNIQVKEVTVQDSTTTIANNLTSTVQVFTDDDYQLPYVVGNGTEGCLPAFPPQVFTLPQYGYATLNRDNTENPTERSSFFCLEYFPSKMLRTGNNFEFTYNFEEVPFHSSFAPSQNLFKLANPLVDQYLYRFVSTNNTGGVQFNKNLAGRYANTYKNWFPGPMGRTQGWNLGSGVNRASVSAFATTNRMELEGASYQVPPQPNGMTNNLQGSNTYALENTMIFNSQPANPGTTATYLEGNMLITSESETQPVNRVAYNVGGQMATNNQSSTTAPATGTYNLQEIVPGSVWMERDVYLQGPIWAKIPETGAHFHPSPAMGGFGLKHPPPMMLIKNTPVPGNITSFSDVPVSSFITQYSTGQVTVEMEWELKKENSKRWNPEIQYTNNYNDPQFVDFAPDSTGEYRTTRPIGTRYLTRPL

SEQ ID NO: 206 - protein, 737 aa, Adeno-associated virus
MAADGYLPDWLEDNLSEGIREWWDLKPGAPKPKANQQKQDNGRGLVLPGYKYLGPFNGLDKGEPVNAADAAALEHDKAYDQQLKAGDNPYLRYNHADAEFQERLQEDTSFGGNLGRAVFQAKKRVLEPLGLVEEGAKTAPAKKRPVEPSPQRSPDSSTGIGKKGQQPARKRLNFGQTGDSESVPDPQPLGEPPAAPSSVGSGTVAAGGGAPMADNNEGADGVGNASGNWHCDSTWLGDRVITTSTRTWALPTYNNHLYKQISSETAGSTNDNTYFGYSTPWGYFDFNRFHCHFSPRDWQRLINNNWGFRPKKLRFKLFNIQVKEVTTNDGVTTIANNLTSTIQVFSDSEYQLPYVLGSAHQGCLPPFPADVFMIPQYGYLTLNNGSQSVGRSSFYCLEYFPSQMLRTGNNFEFSYSFEDVPFHSSYAHSQSLDRLMNPLIDQYLYYLARTQSNPGGTAGNRELQFYQGGPSTMAEQAKNWLPGPCFRQQRVSKTLDQNNNSNFAWTGATKYHLNGRNSLVNPGVAMATHKDDEDRFFPSSGVLIFGKTGATNKTTLENVLMTNEEEIRPTNPVATEEYGIVSSNLQAANTAAQTQVVNNQGALPGMVWQNRDVYLQGPIWAKIPHTDGNFHPSPLMGGFGLKHPPPQILIKNTPVPANPPEVFTPAKFASFITQYSTGQVSVEIEWELQKENSKRWNPEIQYTSNFEKQTGVDFAVDSQGVYSEPRPIGTRYLTRNL

SEQ ID NO: 207 - DNA, 34 bp, Artificial Sequence
  LoxN
ataacttcgtatagtataccttatacgaagttat
